(19) United States
(12) Patent Application Publication
(10) Pub. No.: US 2023/0295617 A1
(43) Pub. Date: Sep. 21, 2023

(54) METHODS AND COMPOSITIONS OF BIOLOGICALLY ACTIVE AGENTS

(71) Applicant: WAVE LIFE SCIENCES LTD., Singapore (SG)

(72) Inventors: Chandra Vargeese, Schwenksville, PA (US); Jason Jingxin Zhang, Walpole, MA (US); Sethumadhavan Divakaramenon, Lexington, MA (US); David Charles Donnell Butler, Medford, MA (US); Genliang Lu, Winchester, MA (US); Naoki Iwamoto, Boston, MA (US); Hailin Yang, West Roxbury, MA (US); Maria David Frank-Kamenetsky, Brookline, MA (US); Subramanian Marappan, Acton, MA (US)

(21) Appl. No.: 18/072,296

(22) Filed: Nov. 30, 2022

Related U.S. Application Data
(63) Continuation of application No. 16/098,658, filed on Nov. 2, 2018, now abandoned.
(60) Provisional application No. 62/331,961, filed on May 4, 2016.
(60) Provisional application No. 62/405,810, filed on Oct. 7, 2016.

(51) Int. Cl. C12N 15/11; A61K 47/54; A61K 31/7088

(52) U.S. Cl. CPC C12N 15/111; A61K 47/542; A61K 31/7088; C12N 2310/141; C12N 2310/14; C12N 2310/20; C12N 2320/32; C12N 2310/11; C12N 2310/16; C12N 2310/315; C12N 2310/3515

(57) ABSTRACT

In some embodiments, the present disclosure pertains to compositions and methods related to delivery of a biologically active agent, wherein the compositions comprise a biologically active agent and a lipid. In various embodiments, the lipid is selected from: lauric acid, myristic acid, palmitic acid, stearic acid, oleic acid, linoleic acid, alpha-linolenic acid, gamma-linolenic acid, docosahexaenoic acid (cis-DHA), turbinaric acid and dilinoleyl. In some embodiments, a composition and method are useful for delivery of a biologically active agent to a particular cell or tissue, e.g., a muscle cell or tissue.

### CROSS-REFERENCE TO RELATED APPLICATIONS

[0001] This application is a continuation of U.S. application Ser. No. 16/098,658, filed Nov. 2, 2018, which is the National Stage of International Application No. PCT/US2017/030777, filed May 3, 2017, which claims priority to United States Provisional Application Nos. 62/331,961, filed May 4, 2016, and 62/405,810, filed Oct. 7, 2016, the entirety of each of which is incorporated herein by reference.

### SEQUENCE LISTING

[0002] The instant application contains a Sequence Listing which has been submitted electronically in XML format and is hereby incorporated by reference in its entirety. Said XML copy, created on May 9, 2023, is named 2010581-1183.xml and is 3,771,428 bytes in size.

### BACKGROUND

[0003] Many biologically active agents cannot be effectively delivered to their target locations, e.g., cells, tissues, organs, etc., thereby limiting their use as therapeutics. There is a long-felt need in the art for efficient and/or effective delivery of biologically active agents to such target locations. There is a particular long-felt need in the art for efficient and/or effective delivery of biologically active agents into cells (i.e., to intracellular sites).

### SUMMARY

[0004] Among other things, the present disclosure encompasses the recognition that lipids can surprisingly enable and/or promote delivery of biologically active agents to their target location(s) (e.g., cells, tissues, organs, etc.) In some embodiments, lipids can be utilized to effectively improve delivery of biologically active agents to their target location(s) in a subject, e.g., in a mammal or human subject, etc. The present disclosure particularly documents the surprising achievement of efficient and/or effective delivery of biologically active agent(s) into cells (i.e., to intracellular location(s)). In some embodiments, the present disclosure also demonstrates surprising achievements that lipids can improve many properties, e.g., pharmacokinetics (e.g., half-life), activities, immunogenicity, etc. of biologically active agents. For example, in some embodiments, the present disclosure demonstrates that lipids can be utilized to effectively improve immune characteristics of biologically active agents, e.g., by modulating immune responses mediated by TLR9.

[0005] In light of the findings provided herein, those skilled in the art will appreciate that use of lipids can permit or facilitate delivery of biologically active agents, particularly to intracellular locations. Furthermore, in light of the findings provided herein, those skilled in the art will appreciate that use of lipids as described herein may permit or facilitate delivery of an effective and/or desired amount of biologically active agent to its target location(s) so that, for example, a comparable or higher level of the biologically active agent is achieved at the target location(s) than is observed when the biologically active agent is administered absent the lipid, in some embodiments, even though a lower amount of the biologically active agent may be administered with the lipid than without. Alternatively or additionally, in light of the findings provided herein, those skilled in the art will appreciate that use of lipids as described herein may permit or facilitate improved distribution (i.e., increased relative level of biologically active agent at a target location(s) as compared with at a non-target location(s)) relative to an appropriate control (e.g., that level observed when the biologically active agent, e.g., oligonucleotide, is comparably administered absent the lipid). Furthermore, in light of the findings provided herein, those skilled in the art will appreciate that use of lipids as described herein may permit or facilitate improved efficacy and/or low toxicities relative to an relative control (e.g., absent the lipids), for example, in some embodiments, improved properties (e.g., activities, pharmacokinetics, etc.) may permit a lower unit doses and/or less frequent administrations; in some embodiments, improved properties and/or lower toxicities (e.g., improved pharmacokinetics, undesired immune responses mediated by TLR9) may permit, if desired, higher unit doses and/or more frequent administrations. Still further, in light of the findings provided herein, those skilled in the art will appreciate that use of lipids as described herein may render biologically active agents that have otherwise been considered unsuitable for therapeutic use to be successfully used for treating various diseases, disorders and/or conditions.

[0006] In some embodiments, the present disclosure encompasses certain surprising findings, including that certain lipids are particularly effective at delivering biologically active agents to particular types of cells and tissues, including, but not limited to, cells and tissues outside the liver (e.g., extra-hepatic), including, but not limited to, muscle cells and tissues. In some embodiments, the present disclosure provides technologies (compounds, compositions, methods, etc.) that are surprisingly effective at delivering biologically active agents to muscle cells and tissues, e.g., of heart, thoracic diaphragm, skeletal muscle cells and tissues, gastrocnemius, quadriceps, triceps, and/or smooth muscle cells and tissues, etc.

[0007] In some embodiments, the present disclosure provides a composition comprising a biologically active agent and a lipid. Many lipids can be utilized in provided technologies in accordance with the present disclosure. In some embodiments, a lipid comprises an optionally substituted, C₁₀-C₈₀ saturated or partially unsaturated aliphatic group, wherein one or more methylene units are optionally and independently replaced by an optionally substituted group selected from C₁-C₆ alkylene, C₁-C₆ alkenylene, —C≡C—, a C₁-C₆ heteroaliphatic moiety, —C(R′)₂—, -Cy-, —O—, —S—, —S—S—, —N(R′)—, —C(O)—, —C(S)—, —C(NR′)—, —C(O)N(R′)—, —N(R′)C(O)N(R′)—, —N(R′)C(O)—, —N(R′)C(O)O—, —OC(O)N(R′)—, —S(O)—, —S(O)₂—, —S(O)₂N(R′)—, —N(R′)S(O)₂—, —SC(O)—, —C(O)S—, —OC(O)—, and —C(O)O—, wherein each variable is independently as defined and described herein. In some embodiments, a lipid comprises an optionally substituted C₁₀-C₈₀ saturated or partially unsaturated, aliphatic chain. In some embodiments, a lipid comprises an optionally substituted C₁₀-C₈₀ linear, saturated or partially unsaturated, aliphatic chain. In some embodiments, a lipid comprises a C₁₀-C₈₀ linear, saturated or partially unsaturated, aliphatic chain, optionally substituted with one or more C₁₋₄ aliphatic group. In some embodiments, a lipid comprises an unsubstituted C₁₀-C₈₀ linear, saturated or partially unsaturated, aliphatic chain. In some embodiments, a lipid comprises no more than one optionally substituted C₁₀-C₈₀ linear, saturated or partially unsaturated, aliphatic chain. In some embodiments, a lipid comprises two or more optionally substituted C₁₀-C₈₀ linear, saturated or partially unsaturated, aliphatic chain. In some embodiments, a lipid comprises an optionally substituted C₁₀-C₈₀ saturated or partially unsaturated, aliphatic chain. In some embodiments, a lipid comprises an optionally substituted C₁₀-C₈₀ linear, saturated or partially unsaturated, aliphatic chain. In some embodiments, a lipid comprises a C₁₀-C₈₀ linear, saturated or partially unsaturated, aliphatic chain, optionally substituted with one or more C₁₋₄ aliphatic group. In some embodiments, a lipid comprises an unsubstituted C₁₀-C₈₀ linear, saturated or partially unsaturated, aliphatic chain. In some embodiments, a lipid comprises no more than one optionally substituted C₁₀-C₈₀ linear, saturated or partially unsaturated, aliphatic chain. In some embodiments, a lipid comprises two or more optionally substituted C₁₀-C₈₀ linear, saturated or partially unsaturated, aliphatic chain. In some embodiments, a lipid comprises an optionally substituted C₁₀-C₄₀ saturated or partially unsaturated, aliphatic chain. In some embodiments, a lipid comprises an optionally substituted C₁₀-C₄₀ linear, saturated or partially unsaturated, aliphatic chain. In some embodiments, a lipid comprises a C₁₀-C₄₀ linear, saturated or partially unsaturated, aliphatic chain, optionally substituted with one or more C₁₋₄ aliphatic group. In some embodiments, a lipid comprises an unsubstituted C₁₀-C₄₀ linear, saturated or partially unsaturated, aliphatic chain. In some embodiments, a lipid comprises no more than one optionally substituted C₁₀-C₈₀ linear, saturated or partially unsaturated, aliphatic chain. In some embodiments, a lipid comprises two or more optionally substituted C₁₀-C₄₀ linear, saturated or partially unsaturated, aliphatic chain.

[0008] In some embodiments, the present disclosure provides a composition comprising a biologically active agent and a lipid. Many lipids can be utilized in provided technologies in accordance with the present disclosure. In some embodiments, a lipid comprises an optionally substituted, C₁₀-C₆₀ saturated or partially unsaturated aliphatic group, wherein one or more methylene units are optionally and independently replaced by an optionally substituted group selected from C₁-C₆ alkylene, C₁-C₆ alkenylene, —C≡C—, a C₁-C₆ heteroaliphatic moiety, —C(R′)₂—, -Cy-, —O—, —S—, —S—S—, —N(R′)—, —C(O)—, —C(S)—, —C(NR′)—, —C(O)N(R′)—, —N(R′)C(O)N(R′)—, —N(R′)C(O)—, —N(R′)C(O)O—, —OC(O)N(R′)—, —S(O)—, —S(O)₂—, —S(O)₂N(R′)—, —N(R′)S(O)₂—, —SC(O)—, —C(O)S—, —OC(O)—, and —C(O)O—, wherein each variable is independently as defined and described herein. In some embodiments, a lipid comprises an optionally substituted C₁₀-C₈₀ saturated or partially unsaturated, aliphatic chain. In some embodiments, a lipid comprises an optionally substituted C₁₀-C₈₀ linear, saturated or partially unsaturated, aliphatic chain. In some embodiments, a lipid comprises a C₁₀-C₈₀ linear, saturated or partially unsaturated, aliphatic chain, optionally substituted with one or more C₁₋₄ aliphatic group. In some embodiments, a lipid comprises an unsubstituted C₁₀-C₈₀ linear, saturated or partially unsaturated, aliphatic chain. In some embodiments, a lipid comprises no more than one optionally substituted C₁₀-C₈₀ linear, saturated or partially unsaturated, aliphatic chain. In some embodiments, a lipid comprises two or more optionally substituted C₁₀-C₈₀ linear, saturated or partially unsaturated, aliphatic chain. In some embodiments, a lipid comprises an optionally substituted C₁₀-C₆₀ saturated or partially unsaturated, aliphatic chain. In some embodiments, a lipid comprises an optionally substituted C₁₀-C₆₀ linear, saturated or partially unsaturated, aliphatic chain. In some embodiments, a lipid comprises a C₁₀-C₆₀ linear, saturated or partially unsaturated, aliphatic chain, optionally substituted with one or more C₁₋₄ aliphatic group. In some embodiments, a lipid comprises an unsubstituted C₁₀-C₆₀ linear, saturated or partially unsaturated, aliphatic chain. In some embodiments, a lipid comprises no more than one optionally substituted C₁₀-C₆₀ linear, saturated or partially unsaturated, aliphatic chain. In some embodiments, a lipid comprises two or more optionally substituted C₁₀-C₆₀ linear, saturated or partially unsaturated, aliphatic chain. In some embodiments, a lipid comprises an optionally substituted C₁₀-C₄₀ saturated or partially unsaturated, aliphatic chain. In some embodiments, a lipid comprises an optionally substituted C₁₀-C₄₀ linear, saturated or partially unsaturated, aliphatic chain. In some embodiments, a lipid comprises a C₁₀-C₄₀ linear, saturated or partially unsaturated, aliphatic chain, optionally substituted with one or more C₁₋₄ aliphatic group. In some embodiments, a lipid comprises an unsubstituted C₁₀-C₄₀ linear, saturated or partially unsaturated, aliphatic chain. In some embodiments, a lipid comprises no more than one optionally substituted C₁₀-C₆₀ linear, saturated or partially unsaturated, aliphatic chain. In some embodiments, a lipid comprises two or more optionally substituted C₁₀-C₄₀ linear, saturated or partially unsaturated, aliphatic chain.

[0009] In some embodiments, the present disclosure provides a composition comprising a biologically active agent and a lipid. Many lipids can be utilized in provided technologies in accordance with the present disclosure. In some embodiments, a lipid comprises an optionally substituted, C₁₀-C₄₀ saturated or partially unsaturated aliphatic group, wherein one or more methylene units are optionally and independently replaced by an optionally substituted group selected from C₁-C₆ alkylene, C₁-C₆ alkenylene, —C≡C—, a C₁-C₆ heteroaliphatic moiety, —C(R′)₂—, -Cy-, —O—, —S—, —S—S—, —N(R′)—, —C(O)—, —C(S)—, —C(NR′)—, —C(O)N(R′)—, —N(R′)C(O)N(R′)—, —N(R′)C(O)—, —N(R′)C(O)O—, —OC(O)N(R′)—, —S(O)—, —S(O)₂—, —S(O)₂N(R′)—, —N(R′)S(O)₂—, —SC(O)—, —C(O)S—, —OC(O)—, and —C(O)O—, wherein each variable is independently as defined and described herein. In some embodiments, a lipid comprises an optionally substituted C₁₀-C₈₀ saturated or partially unsaturated, aliphatic chain. In some embodiments, a lipid comprises an optionally substituted C₁₀-C₈₀ linear, saturated or partially unsaturated, aliphatic chain. In some embodiments, a lipid comprises a C₁₀-C₈₀ linear, saturated or partially unsaturated, aliphatic chain, optionally substituted with one or more C₁₋₄ aliphatic group. In some embodiments, a lipid comprises an unsubstituted C₁₀-C₈₀ linear, saturated or partially unsaturated, aliphatic chain. In some embodiments, a lipid comprises no more than one optionally substituted C₁₀-C₈₀ linear, saturated or partially unsaturated, aliphatic chain. In some embodiments, a lipid comprises two or more optionally substituted C₁₀-C₈₀ linear, saturated or partially unsaturated, aliphatic chain. In some embodiments, a lipid comprises an optionally substituted C₁₀-C₄₀ saturated or partially unsaturated, aliphatic chain. In some embodiments, a lipid comprises an optionally substituted C₁₀-C₆₀ linear, saturated or partially unsaturated, aliphatic chain. In some embodiments, a lipid comprises a C₁₀-C₆₀ linear, saturated or partially unsaturated, aliphatic chain, optionally substituted with one or more C₁₋₄ aliphatic group. In some embodiments, a lipid comprises an unsubstituted C₁₀-C₆₀ linear, saturated or partially unsaturated, aliphatic chain. In some embodiments, a lipid comprises no more than one optionally substituted C₁₀-C₆₀ linear, saturated or partially unsaturated, aliphatic chain. In some embodiments, a lipid comprises two or more optionally substituted C₁₀-C₆₀ linear, saturated or partially unsaturated, aliphatic chain. In some embodiments, a lipid comprises an optionally substituted C₁₀-C₆₀ saturated or partially unsaturated, aliphatic chain. In some embodiments, a lipid comprises an optionally substituted C₁₀-C₄₀ linear, saturated or partially unsaturated, aliphatic chain. In some embodiments, a lipid comprises a C₁₀-C₄₀ linear, saturated or partially unsaturated, aliphatic chain, optionally substituted with one or more C₁₋₄ aliphatic group. In some embodiments, a lipid comprises an unsubstituted C₁₀-C₄₀ linear, saturated or partially unsaturated, aliphatic chain. In some embodiments, a lipid comprises no more than one optionally substituted C₁₀-C₄₀ linear, saturated or partially unsaturated, aliphatic chain. In some embodiments, a lipid comprises two or more optionally substituted C₁₀-C₄₀ linear, saturated or partially unsaturated, aliphatic chain.

[0010] In some embodiments, the present disclosure provides a composition comprising a biologically active agent and a lipid comprising a C₁₀-C₈₀ linear, saturated or partially unsaturated, aliphatic chain. In some embodiments, the present disclosure pertains to a composition comprising a biologically active agent and a lipid comprising a C₁₀-C₈₀ linear, saturated or partially unsaturated, aliphatic chain, optionally substituted with one or more C₁₋₄ aliphatic group. In some embodiments, the present disclosure provides a composition comprising a biologically active agent and a lipid comprising a C₁₀-C₆₀ linear, saturated or partially unsaturated, aliphatic chain. In some embodiments, the present disclosure pertains to a composition comprising a biologically active agent and a lipid comprising a C₁₀-C₆₀ linear, saturated or partially unsaturated, aliphatic chain, optionally substituted with one or more C₁₋₄ aliphatic group. In some embodiments, the present disclosure provides a composition comprising a biologically active agent and a lipid comprising a C₁₀-C₄₀ linear, saturated or partially unsaturated, aliphatic chain. In some embodiments, the present disclosure pertains to a composition comprising a biologically active agent and a lipid comprising a C₁₀-C₄₀ linear, saturated or partially unsaturated, aliphatic chain, optionally substituted with one or more C₁₋₄ aliphatic group.

[0011] In some embodiments, the present disclosure pertains to a composition comprising a biologically active agent and a lipid selected from the group consisting of: lauric acid, myristic acid, palmitic acid, stearic acid, oleic acid, linoleic acid, alpha-linolenic acid, gamma-linolenic acid, docosahexaenoic acid (cis-DHA), turbinaric acid and dilinoleyl. In some embodiments, a lipid has a structure of any of:

[chemical structure]

[0012] In some embodiments, a lipid is conjugated to a biologically active agent. A person having ordinary skill in the art appreciates that various technologies can be utilized to conjugate lipids to biologically active agent in accordance with the present disclosure. In some embodiments, a lipid is not conjugated to a biologically active agent.

[0013] Various biologically active agents can be effectively delivered to their targets in accordance with the present disclosure. In some embodiments, a biologically active agent is selected from the group consisting of: a small molecule, a peptide, a protein, a component of a CRISPR-Cas system, a carbohydrate, a therapeutic agent, a chemotherapeutic agent, a vaccine, a nucleic acid, and a lipid. In some embodiments, a nucleic acid comprises one or more: nucleotides (e.g., natural nucleotides, modified nucleotides nucleotide analogs, etc.). In some embodiments, a nucleic acid is an oligonucleotide, an antisense oligonucleotide, an RNAi agent, a miRNA, immunomodulatory nucleic acid, an aptamer, a Piwi-interacting RNA (piRNA), a small nucleolar RNA (snoRNA), a ribozyme, a mRNA, a lncRNA, a ncRNA, an antigomir (e.g., an antagonist to a miRNA, lncRNA, ncRNA or other nucleic acid), a plasmid, a vector, or a portion thereof. In some embodiments, a biologically active agent is an oligonucleotide. In some embodiments, the present disclosure provides compositions comprising an oligonucleotide and a lipid. Among other things, such compositions are surprisingly effective at delivering oligonucleotides to their target locations, in some embodiments, delivering oligonucleotides into the cells at the target locations. In some embodiments, provided technologies are surprisingly effective at delivering oligonucleotides to muscle cells, tissues, etc. In some embodiments, provided compounds, for example, oligonucleotides conjugated with lipids, have unexpectedly improved properties, e.g., improved activities, improved pharmacokinetics, lowered toxicities (e.g., lowered undesired immuno responses), improved delivery to targets (e.g., cells, tissues, organs, organisms, etc.), etc. In some embodiments, an oligonucleotide is an oligonucleotide described in Patent Application Publications US20120316224, US20140194610, US20150211006, and WO2015107425, and U.S. Pat. Nos. 9,243,245; 9,249,416; 9,175,286; 9,234,198; 8,895,309; 8,741,863; 8,097,596; 5,854,223; 5,756,476; and 8,871,918; the oligonucleotides and oligonucleotide compositions of each of which are incorporated herein by reference. In some embodiments, an oligonucleotide comprises one or more chiral internucleotidic linkages. In some embodiments, for oligonucleotides comprising one or more chiral internucleotidic linkages, a provided composition is a stereorandom composition of such oligonucleotides in that stereochemistry of each of the chiral internucleotidic linkages is not controlled. In some embodiments, a stereorandom composition is prepared by oligonucleotide synthesis without dedicated efforts e.g., through chiral auxiliaries, etc. to control the stereochemistry of each chiral internucleotidic linkages. In some embodiments, for oligonucleotides comprising one or more chiral internucleotidic linkages, a provided composition is a chirally controlled oligonucleotide composition of such oligonucleotides in that stereochemistry of at least one of the chiral internucleotidic linkages is controlled. In some embodiments, stereochemistry of each of the chiral internucleotidic linkages is independently controlled, and a provided composition is a completely chirally controlled oligonucleotide composition. In some embodiments, stereochemistry of one or more chiral internucleotidic linkages is controlled (chiral controlled internucleotidic linkages) while stereochemistry of one or more chiral internucleotidic linkages is not controlled (stereorandom/non-chirally controlled internucleotidic linkages), and a provided composition is a partially chirally controlled oligonucleotide composition. In some embodiments, a chirally controlled oligonucleotide composition can be prepared by oligonucleotide synthesis comprising stereoselective formation of one or more or all chiral internucleotidic linkages using, for example, technologies described in Patent Application Publications US20120316224, US20140194610, US20150211006, and WO2015107425, the technologies of each of which are incorporated herein by reference. In some embodiments, a provided composition comprises a chirally controlled oligonucleotide composition described in Patent Application Publications US20120316224, US20140194610, US20150211006, and WO2015107425, the chirally controlled oligonucleotide compositions of each of which are incorporated herein by reference, and a lipid. In some embodiments, a lipid is conjugated to oligonucleotides comprising stereochemically controlled internucleotidic linkages.

[0014] In some embodiments, the present disclosure provides a chirally controlled oligonucleotide composition comprising a plurality of oligonucleotides, which share:
[0015] 1) a common base sequence;
[0016] 2) a common pattern of backbone linkages; and
[0017] 3) a common pattern of backbone phosphorus modifications;
   wherein:

[0018] the composition is chirally controlled in that the plurality of oligonucleotides share the same stereochemistry at one or more chiral internucleotidic linkages, and level of the plurality of oligonucleotides in the composition is pre-determined;

[0019] one or more oligonucleotides of the plurality are independently conjugated to a lipid; and one or more oligonucleotides of the plurality are optionally and independently conjugated to a target component.

[0020] In some embodiments, the present disclosure provides a chirally controlled oligonucleotide composition comprising a plurality of oligonucleotides, which share:
[0021] 1) a common base sequence;
[0022] 2) a common pattern of backbone linkages; and
[0023] 3) a common pattern of backbone phosphorus modifications;
   wherein:

[0024] the composition is chirally controlled in that the plurality of oligonucleotides share the same stereochemistry at one or more chiral internucleotidic linkages, and at least 0.5%, 1%, 2%, 3%, 4%, 5%, 6%, 7%, 8%, 9%, 10%, 15%, 20%, 25%, 30%, 35%, 40%, 45%, 50%, 55%, 60%, 65%, 70%, 75%, 80%, 85%, 90%, 91%, 92%, 93%, 94%, 95%, 96%, 97%, 98% or 99% of oligonucleotides in the composition that share the common base sequence, the common pattern of backbone linkages; and the common pattern of backbone phosphorus modifications share the same stereochemistry at the one or more chiral internucleotidic linkages;

[0025] one or more oligonucleotides of the plurality are independently conjugated to a lipid; and one or more oligonucleotides of the plurality are optionally and independently conjugated to a target component.

[0026] In some embodiments, the present disclosure provides an oligonucleotide composition comprising a plurality of oligonucleotides having the structure of:

A^{c}-[-L^{LD}-(R^{LD})ₐ]_{b}, or [(A^{c})ₐ-L^{LD}]_{b}-R^{LD},

wherein:
[0027] A^{c} is a biologically active agent;
[0028] a is 1-1000;
[0029] b is 1-1000;
[0030] each L^{LD} is independently a linker moiety or a covalent bond; and
[0031] each R^{LD} is independently a lipid moiety or a targeting component.

[0032] In some embodiments, the present disclosure provides an oligonucleotide composition comprising a plurality of oligonucleotides having the structure of:

A^{c}-[-L^{LD}-(R^{LD})ₐ]_{b}, or [(A^{c})ₐ-L^{LD}]_{b}-R^{LD},

wherein:
[0033] A^{c} is a biologically active agent;
[0034] a is 1-1000;
[0035] b is 1-1000;
[0036] each L^{LD} is independently a linker moiety; and
[0037] each R^{LD} is independently a lipid moiety or a targeting component, wherein at least one R^{LD} is a lipid moiety.

[0038] In some embodiments, the present disclosure provides an oligonucleotide composition comprising a plurality of oligonucleotides having the structure of:

A^{c}-[-L^{LD}-(R^{LD})ₐ]_{b}, or [(A^{c})ₐ-L^{LD}]_{b}-R^{LD},

wherein:
[0039] A^{c} is a biologically active agent;
[0040] a is 1-1000;
[0041] b is 1-1000;
[0042] each L^{LD} is independently a covalent bond or an optionally substituted, C₁-C₈₀ saturated or partially unsaturated aliphatic group, wherein one or more methylene units are optionally and independently replaced by T^{LD} or an optionally substituted group selected from C₁-C₆ alkylene, C₁-C₆ alkenylene, —C≡C—, a C₁-C₆ heteroaliphatic moiety, —C(R′)₂—, -Cy-, —O—, —S—, —S—S—, —N(R′)—, —C(O)—, —C(S)—, —C(NR′)—, —C(O)N(R′)—, —N(R′)C(O)N(R′)—, —N(R′)C(O)—, —N(R′)C(O)O—, —OC(O)N(R′)—, —S(O)—, —S(O)₂—, —S(O)₂N(R′)—, —N(R′)S(O)₂—, —SC(O)—, —C(O)S—, —OC(O)—, and —C(O)O—;
[0043] each R^{LD} is independently an optionally substituted, C₁-C₈₀ saturated or partially unsaturated aliphatic group, wherein one or more methylene units are optionally and independently replaced by an optionally substituted group selected from C₁-C₆ alkylene, C₁-C₆ alkenylene, —C≡C—, a C₁-C₆ heteroaliphatic moiety, —C(R′)₂—, -Cy-, —O—, —S—, —S—S—, —N(R′)—, —C(O)—, —C(S)—, —C(NR′)—, —C(O)N(R′)—, —N(R′)C(O)N(R′)—, —N(R′)C(O)—, —N(R′)C(O)O—, —OC(O)N(R′)—, —S(O)—, —S(O)₂—, —S(O)₂N(R′)—, —N(R′)S(O)₂—, —SC(O)—, —C(O)S—, —OC(O)—, and —C(O)O—;
[0044] T^{LD} has the structure of:

[chemical structure]

[0045] W is O, S or Se;
[0046] each of X, Y and Z is independently —O—, —S—, —N(-L-R′)—, or L;
[0047] L is a covalent bond or an optionally substituted, linear or branched C₁-C₁₀ alkylene, wherein one or more methylene units of L are optionally and independently replaced by an optionally substituted group selected from C₁-C₆ alkylene, C₁-C₆ alkenylene, —C≡C—, a C₁-C₆ heteroaliphatic moiety, —C(R′)₂—, -Cy-, —O—, —S—, —S—S—, —N(R′)—, —C(O)—, —C(S)—, —C(NR′)—, —C(O)N(R′)—, —N(R′)C(O)N(R′)—, —N(R′)C(O)—, —N(R′)C(O)O—, —OC(O)N(R′)—, —S(O)—, —S(O)₂—, —S(O)₂N(R′)—, —N(R′)S(O)₂— —SC(O)—, —C(O)S—, —OC(O)—, and —C(O)O—;
[0048] R¹ is halogen, R, or an optionally substituted C₁-C₅₀ aliphatic wherein one or more methylene units are optionally and independently replaced by an optionally substituted group selected from C₁-C₆ alkylene, C₁-C₆ alkenylene, —C≡C—, a C₁-C₆ heteroaliphatic moiety, —C(R′)₂—, -Cy-, —O—, —S—, —S—S—, —N(R′)—, —C(O)—, —C(S)—, —C(NR′)—, —C(O)N(R′)—, —N(R′)C(O)N(R′)—, —N(R′)C(O)—, —N(R′)C(O)O—, —OC(O)N(R′)—, —S(O)—, —S(O)₂—, —S(O)₂N(R′)—, —N(R′)S(O)₂— —SC(O)—, —C(O)S—, —OC(O)—, and —C(O)O—
[0049] each R′ is independently —R, —C(O)R, —CO₂R, or —SO₂R, or:
   [0050] two R′ are taken together with their intervening atoms to form an optionally substituted aryl, carbocyclic, heterocyclic, or heteroaryl ring;
[0051] -Cy- is an optionally substituted bivalent ring selected from phenylene, carbocyclylene, arylene, heteroarylene, and heterocyclylene; and
[0052] each R is independently hydrogen, or an optionally substituted group selected from C₁-C₆ aliphatic, carbocyclyl, aryl, heteroaryl, and heterocyclyl.

[0053] In some embodiments, A^{c} is an oligonucleotide chain ([H]_{b}-A^{c} is an oligonucleotide). In some embodiments, [H]_{b}-A^{c} is an oligonucleotide of any of the Tables. In some embodiments, H-A^{c} is a small molecule. In some embodiments, H-A^{c} is a peptide. In some embodiments, H-A^{c} is a protein.

[0054] In some embodiments, P in T^{LD} is P*. In some embodiments, a conjugate has the structure of [(A^{c})ₐ-L^{LD}]_{b}-R^{LD}. In some embodiments, a conjugate has the structure of (A^{c})ₐ-L^{LD}-R^{LD}. In some embodiments, a is 1-100. In some embodiments, a is 1-50. In some embodiments, a is 1-40. In some embodiments, a is 1-30. In some embodiments, a is 1-20. In some embodiments, a is 1-15. In some embodiments, a is 1-10. In some embodiments, a is 1-9. In some embodiments, a is 1-8. In some embodiments, a is 1-7. In some embodiments, a is 1-6. In some embodiments, a is 1-5. In some embodiments, a is 1-4. In some embodiments, a is 1-3. In some embodiments, a is 1-2. In some embodiments, a is 1. In some embodiments, a is 2. In some embodiments, a is 3. In some embodiments, a is 4. In some embodiments, a is 5. In some embodiments, a is 6. In some embodiments, a is 7. In some embodiments, a is 8. In some embodiments, a is 9. In some embodiments, a is 10. In some embodiments, a is more than 10. In some embodiments, b is 1-100. In some embodiments, b is 1-50. In some embodiments, b is 1-40. In some embodiments, b is 1-30. In some embodiments, b is 1-20. In some embodiments, b is 1-15. In some embodiments, b is 1-10. In some embodiments, b is 1-9. In some embodiments, b is 1-8. In some embodiments, b is 1-7. In some embodiments, b is 1-6. In some embodiments, b is 1-5. In some embodiments, b is 1-4. In some embodiments, b is 1-3. In some embodiments, b is 1-2. In some embodiments, b is 1. In some embodiments, b is 2. In some embodiments, b is 3. In some embodiments, b is 4. In some embodiments, b is 5. In some embodiments, b is 6. In some embodiments, b is 7. In some embodiments, b is 8. In some embodiments, b is 9. In some embodiments, b is 10. In some embodiments, b is more than 10. In some embodiments, a conjugate has the structure of A^{c}-L^{LD}-R^{LD}. In some embodiments, A^{c} is conjugated through one or more of its sugar, base and/or internucleotidic linkage moieties. In some embodiments, A^{c} is conjugated through its 5′-OH (5′-O—). In some embodiments, A^{c} is conjugated through its 3′-OH (3′-O—). In some embodiments, before conjugation, A^{c}-(H)_{b} (b is an integer of 1-1000 depending on valency of A^{c}) is an oligonucleotide as described herein, for example, one of those described in any one of the Tables. In some embodiments, L^{LD} is -L-. In some embodiments, L^{LD} comprises a phosphorothioate group. In some embodiments, L^{LD} is —C(O)NH—(CH₂)₆—OP(═O)(S⁻)—O—. In some embodiments, the —C(O)NH end is connected to R^{LD}, and the —O— end is connected to the oligonucleotide, e.g., through 5′- or 3′-end. In some embodiments, R^{LD} is optionally substituted C₁₀, C₁₅, C₁₆, C₁₇, C₁₈, C₁₉, C₂₀, C₂₁, C₂₂, C₂₃, C₂₄, or C₂₅ to C₂₀, C₂₁, C₂₂, C₂₃, C₂₄, C₂₅, C₂₆, C₂₇, C₂₈, C₂₉, C₃₀, C₃₅, C₄₀, C₄₅, C₅₀, C₆₀, C₇₀, or C₈₀ aliphatic. In some embodiments, R^{LD} is optionally substituted C₁₀₋₈₀ aliphatic. In some embodiments, R^{LD} is optionally substituted C₂₀₋₈₀ aliphatic. In some embodiments, R^{LD} is optionally substituted C₁₀₋₇₀ aliphatic. In some embodiments, R^{LD} is optionally substituted C₂₀₋₇₀ aliphatic. In some embodiments, R^{LD} is optionally substituted C₁₀₋₆₀ aliphatic. In some embodiments, R^{LD} is optionally substituted C₂₀₋₆₀ aliphatic. In some embodiments, R^{LD} is optionally substituted C₁₀₋₅₀ aliphatic. In some embodiments, R^{LD} is optionally substituted C₂₀₋₅₀ aliphatic. In some embodiments, R^{LD} is optionally substituted C₁₀₋₄₀ aliphatic. In some embodiments, R^{LD} is optionally substituted C₂₀₋₄₀ aliphatic. In some embodiments, R^{LD} is optionally substituted C₁₀₋₃₀ aliphatic. In some embodiments, R^{LD} is optionally substituted C₂₀₋₃₀ aliphatic. In some embodiments, R^{LD} is unsubstituted C₁₀, C₁₅, C₁₆, C₁₇, C₁₈, C₁₉, C₂₀, C₂₁, C₂₂, C₂₃, C₂₄, or C₂₅ to C₂₀, C₂₁, C₂₂, C₂₃, C₂₄, C₂₅, C₂₆, C₂₇, C₂₈, C₂₉, C₃₀, C₃₅, C₄₀, C₄₅, C₅₀, C₆₀, C₇₀, or C₈₀ aliphatic. In some embodiments, R^{LD} is unsubstituted C₁₀₋₈₀ aliphatic. In some embodiments, R^{LD} is unsubstituted C₂₀₋₈₀ aliphatic. In some embodiments, R^{LD} is unsubstituted C₁₀₋₇₀ aliphatic. In some embodiments, R^{LD} is unsubstituted C₂₀₋₇₀ aliphatic. In some embodiments, R^{LD} is unsubstituted C₁₀₋₆₀ aliphatic. In some embodiments, R^{LD} is unsubstituted C₂₀₋₆₀ aliphatic. In some embodiments, R^{LD} is unsubstituted C₁₀₋₅₀ aliphatic. In some embodiments, R^{LD} is unsubstituted C₂₀₋₅₀ aliphatic. In some embodiments, R^{LD} is unsubstituted C₁₀₋₄₀ aliphatic. In some embodiments, R^{LD} is unsubstituted C₂₀₋₄₀ aliphatic. In some embodiments, R^{LD} is unsubstituted C₁₀₋₃₀ aliphatic. In some embodiments, R^{LD} is unsubstituted C₂₀₋₃₀ aliphatic.

[0055] In some embodiments, a plurality of oligonucleotides share the same stereochemistry at one or more chiral internucleotidic linkages (chirally controlled internucleotidic linkages). In some embodiments, they share the same stereochemistry at two or more chiral internucleotidic linkages. In some embodiments, they share the same stereochemistry at three or more chiral internucleotidic linkages. In some embodiments, they share the same stereochemistry at four or more chiral internucleotidic linkages. In some embodiments, they share the same stereochemistry at five or more chiral internucleotidic linkages. In some embodiments, they share the same stereochemistry at six or more chiral internucleotidic linkages. In some embodiments, they share the same stereochemistry at seven or more chiral internucleotidic linkages. In some embodiments, they share the same stereochemistry at eight or more chiral internucleotidic linkages. In some embodiments, they share the same stereochemistry at nine or more chiral internucleotidic linkages. In some embodiments, they share the same stereochemistry at ten or more chiral internucleotidic linkages. In some embodiments, they share the same stereochemistry at 11 or more chiral internucleotidic linkages. In some embodiments, they share the same stereochemistry at 12 or more chiral internucleotidic linkages. In some embodiments, they share the same stereochemistry at 13 or more chiral internucleotidic linkages. In some embodiments, they share the same stereochemistry at 14 or more chiral internucleotidic linkages. In some embodiments, they share the same stereochemistry at 15 or more chiral internucleotidic linkages. In some embodiments, they share the same stereochemistry at 10% or more of the chiral internucleotidic linkages. In some embodiments, they share the same stereochemistry at 20% or more of the chiral internucleotidic linkages. In some embodiments, they share the same stereochemistry at 30% or more of the chiral internucleotidic linkages. In some embodiments, they share the same stereochemistry at 40% or more of the chiral internucleotidic linkages. In some embodiments, they share the same stereochemistry at 50% or more of the chiral internucleotidic linkages. In some embodiments, they share the same stereochemistry at 60% or more of the chiral internucleotidic linkages. In some embodiments, they share the same stereochemistry at 70% or more of the chiral internucleotidic linkages. In some embodiments, they share the same stereochemistry at 80% or more of the chiral internucleotidic linkages. In some embodiments, they share the same stereochemistry at 90% or more of the chiral internucleotidic linkages. In some embodiments, they share the same stereochemistry at 95% or more of the chiral internucleotidic linkages. In some embodiments, they share the same stereochemistry at 96% or more of the chiral internucleotidic linkages. In some embodiments, they share the same stereochemistry at 97% or more of the chiral internucleotidic linkages. In some embodiments, they share the same stereochemistry at 98% or more of the chiral internucleotidic linkages. In some embodiments, they share the same stereochemistry at each of the chiral internucleotidic linkages. As readily appreciated by a person having ordinary skill in the art and illustrated the examples, chiral internucleotidic linkages where a plurality of oligonucleotides share the same stereochemistry can independently be either Rp or Sp, e.g., at a first chiral internucleotidic linkage a plurality of oligonucleotides are all Rp while at a second position they are all Sp (RpSp; can also be RpRp, SpSp, or SpRp as desired).

[0056] In some embodiments, at least 1%, 2%, 3%, 4%, 5%, 6%, 7%, 8%, 9%, 10%, 15%, 20%, 25%, 30%, 35%, 40%, 45%, 50%, 55%, 60%, 65%, 70%, 75%, 80%, 85%, 90%, 91%, 92%, 93%, 94%, 95%, 96%, 97%, 98% or 99% of oligonucleotides in a provided composition that share the common base sequence, the common pattern of backbone linkages; and the common pattern of backbone phosphorus modifications share the same stereochemistry at the one or more chiral internucleotidic linkages. In some embodiments, the percentage is at least 0.5%. In some embodiments, the percentage is at least 1%. In some embodiments, the percentage is at least 2%. In some embodiments, the percentage is at least 3%. In some embodiments, the percentage is at least 4%. In some embodiments, the percentage is at least 5%. In some embodiments, the percentage is at least 6%. In some embodiments, the percentage is at least 7%. In some embodiments, the percentage is at least 8%. In some embodiments, the percentage is at least 9%. In some embodiments, the percentage is at least 10%. In some embodiments, the percentage is at least 20%. In some embodiments, the percentage is at least 30%. In some embodiments, the percentage is at least 40%. In some embodiments, the percentage is at least 50%. In some embodiments, the percentage is at least 60%. In some embodiments, the percentage is at least 70%. In some embodiments, the percentage is at least 75%. In some embodiments, the percentage is at least 80%. In some embodiments, the percentage is at least 81%. In some embodiments, the percentage is at least 82%. In some embodiments, the percentage is at least 83%. In some embodiments, the percentage is at least 84%. In some embodiments, the percentage is at least 85%. In some embodiments, the percentage is at least 86%. In some embodiments, the percentage is at least 87%. In some embodiments, the percentage is at least 88%. In some embodiments, the percentage is at least 89%. In some embodiments, the percentage is at least 90%. In some embodiments, the percentage is at least 91%. In some embodiments, the percentage is at least 92%. In some embodiments, the percentage is at least 93%. In some embodiments, the percentage is at least 94%. In some embodiments, the percentage is at least 95%. In some embodiments, the percentage is at least 96%. In some embodiments, the percentage is at least 97%. In some embodiments, the percentage is at least 98%. In some embodiments, the percentage is at least 99%.

[0057] In some embodiments, oligonucleotides that share the common base sequence, the common pattern of backbone linkages, the common pattern of backbone phosphorus modifications and the same stereochemistry at the one or more chiral internucleotidic linkages are enriched, for example, relative to oligonucleotides that share the common base sequence, the common pattern of backbone linkages, the common pattern of backbone phosphorus modifications but not the same stereochemistry at the one or more chiral internucleotidic linkages. In some embodiments, as understood by a person having ordinary skill in the art, the enrichment is from the use of one or more provided technologies that enable stereoselective (chirally controlled) formation of each of the internucleotidic linkages where the oligonucleotides share the same stereochemistry.

[0058] In some embodiments, oligonucleotides that share the common base sequence, the common pattern of backbone linkages, the common pattern of backbone phosphorus modifications and the same stereochemistry at the one or more chiral internucleotidic linkages are enriched at least 5 fold (such oligonucleotides have a fraction of 5*(½ⁿ) of oligonucleotides that share the common base sequence, the common pattern of backbone linkages, and the common pattern of backbone phosphorus modifications, wherein n is the number of internucleotidic linkages where such oligonucleotides share the same stereochemistry; or oligonucleotides that share the common base sequence, the common pattern of backbone linkages, the common pattern of backbone phosphorus modifications but not the same stereochemistry at the one or more chiral internucleotidic linkages are no more than [1-(1/2ⁿ)]/5 of oligonucleotides that share the common base sequence, the common pattern of backbone linkages, and the common pattern of backbone phosphorus modifications) compared to a stereorandom preparation of the oligonucleotides wherein none of the internucleotidic linkages are chirally controlled (oligonucleotides that share the common base sequence, the common pattern of backbone linkages, the common pattern of backbone phosphorus modifications, and the same stereochemistry at the one or more chiral internucleotidic linkages are typically considered to have a fraction of ½ⁿ of oligonucleotides that share the common base sequence, the common pattern of backbone linkages, and the common pattern of backbone phosphorus modifications, wherein n is the number of chiral internucleotidic linkages wherein the oligonucleotides share the same stereochemistry, and oligonucleotides that share the common base sequence, the common pattern of backbone linkages, the common pattern of backbone phosphorus modifications but are not of the particular oligonucleotide type are typically considered to have a fraction of [1-(1/2ⁿ)] of oligonucleotides that share the common base sequence, the common pattern of backbone linkages, and the common pattern of backbone phosphorus modifications). In some embodiments, the enrichment is at least 20 fold. In some embodiments, the enrichment is at least 30 fold. In some embodiments, the enrichment is at least 40 fold. In some embodiments, the enrichment is at least 50 fold. In some embodiments, the enrichment is at least 60 fold. In some embodiments, the enrichment is at least 70 fold. In some embodiments, the enrichment is at least 80 fold. In some embodiments, the enrichment is at least 90 fold. In some embodiments, the enrichment is at least 100 fold. In some embodiments, the enrichment is at least 200 fold. In some embodiments, the enrichment is at least 300 fold. In some embodiments, the enrichment is at least 400 fold. In some embodiments, the enrichment is at least 500 fold. In some embodiments, the enrichment is at least 600 fold. In some embodiments, the enrichment is at least 700 fold. In some embodiments, the enrichment is at least 800 fold. In some embodiments, the enrichment is at least 900 fold. In some embodiments, the enrichment is at least 1,000 fold. In some embodiments, the enrichment is at least 2,000 fold. In some embodiments, the enrichment is at least 4,000 fold. In some embodiments, the enrichment is at least 8,000 fold. In some embodiments, the enrichment is at least 10,000 fold. In some embodiments, the enrichment is at least 20,000 fold. In some embodiments, the enrichment is at least (1.5)ⁿ. In some embodiments, the enrichment is at least (1.6)ⁿ. In some embodiments, the enrichment is at least (1.7)ⁿ. In some embodiments, the enrichment is at least (1.1)ⁿ. In some embodiments, the enrichment is at least (1.8)ⁿ. In some embodiments, the enrichment is at least (1.9)ⁿ. In some embodiments, the enrichment is at least 2ⁿ. In some embodiments, the enrichment is at least 3ⁿ. In some embodiments, the enrichment is at least 4ⁿ. In some embodiments, the enrichment is at least 5ⁿ. In some embodiments, the enrichment is at least 6ⁿ. In some embodiments, the enrichment is at least 7ⁿ. In some embodiments, the enrichment is at least 8ⁿ. In some embodiments, the enrichment is at least 9ⁿ. In some embodiments, the enrichment is at least 10ⁿ. In some embodiments, the enrichment is at least 15ⁿ. In some embodiments, the enrichment is at least 20ⁿ. In some embodiments, the enrichment is at least 25ⁿ. In some embodiments, the enrichment is at least 30ⁿ. In some embodiments, the enrichment is at least 40ⁿ. In some embodiments, the enrichment is at least 50ⁿ. In some embodiments, the enrichment is at least 100ⁿ. In some embodiments, enrichment is measured by increase of the fraction of oligonucleotides that share the common base sequence, the common pattern of backbone linkages, the common pattern of backbone phosphorus modifications and the same stereochemistry at the one or more chiral internucleotidic linkages. In some embodiments, an enrichment is measured by decrease of the fraction of oligonucleotides that share the common base sequence, the common pattern of backbone linkages, the common pattern of backbone phosphorus modifications but not the same stereochemistry at the one or more chiral internucleotidic linkages.

[0059] In some embodiments, oligonucleotides of a particular type in a chirally controlled oligonucleotide composition are structurally identical (including stereochemically) and are enriched at least 5 fold (oligonucleotides of the particular type have a fraction of 5*(½ⁿ) of oligonucleotides that have the base sequence, the pattern of backbone linkages, and the pattern of backbone phosphorus modifications of the particular oligonucleotide type, wherein n is the number of chiral internucleotidic linkages; or oligonucleotides that have the base sequence, the pattern of backbone linkages, and the pattern of backbone phosphorus modifications of the particular oligonucleotide type but are not of the particular oligonucleotide type are no more than [1-(1/2ⁿ)]/5 of oligonucleotides that have the base sequence, the pattern of backbone linkages, and the pattern of backbone phosphorus modifications of the particular oligonucleotide type) compared to a stereorandom preparation of the oligonucleotides (oligonucleotides of the particular type are typically considered to have a fraction of ½ⁿ of oligonucleotides that have the base sequence, the pattern of backbone linkages, and the pattern of backbone phosphorus modifications of the particular oligonucleotide type, wherein n is the number of chiral internucleotidic linkages, and oligonucleotides that have the base sequence, the pattern of backbone linkages, and the pattern of backbone phosphorus modifications of the particular oligonucleotide type but are not of the particular oligonucleotide type are typically considered to have a fraction of [1-(1/2ⁿ)] of oligonucleotides that have the base sequence, the pattern of backbone linkages, and the pattern of backbone phosphorus modifications of the particular oligonucleotide type). In some embodiments, the enrichment is at least 20 fold. In some embodiments, the enrichment is at least 30 fold. In some embodiments, the enrichment is at least 40 fold. In some embodiments, the enrichment is at least 50 fold. In some embodiments, the enrichment is at least 60 fold. In some embodiments, the enrichment is at least 70 fold. In some embodiments, the enrichment is at least 80 fold. In some embodiments, the enrichment is at least 90 fold. In some embodiments, the enrichment is at least 100 fold. In some embodiments, the enrichment is at least 200 fold. In some embodiments, the enrichment is at least 300 fold. In some embodiments, the enrichment is at least 400 fold. In some embodiments, the enrichment is at least 500 fold. In some embodiments, the enrichment is at least 600 fold. In some embodiments, the enrichment is at least 700 fold. In some embodiments, the enrichment is at least 800 fold. In some embodiments, the enrichment is at least 900 fold. In some embodiments, the enrichment is at least 1,000 fold. In some embodiments, the enrichment is at least 2,000 fold. In some embodiments, the enrichment is at least 4,000 fold. In some embodiments, the enrichment is at least 8,000 fold. In some embodiments, the enrichment is at least 10,000 fold. In some embodiments, the enrichment is at least 20,000 fold. In some embodiments, the enrichment is at least (1.5)ⁿ. In some embodiments, the enrichment is at least (1.6)ⁿ. In some embodiments, the enrichment is at least (1.7)ⁿ. In some embodiments, the enrichment is at least (1.1)ⁿ. In some embodiments, the enrichment is at least (1.8)ⁿ. In some embodiments, the enrichment is at least (1.9)ⁿ. In some embodiments, the enrichment is at least 2ⁿ. In some embodiments, the enrichment is at least 3ⁿ. In some embodiments, the enrichment is at least 4ⁿ. In some embodiments, the enrichment is at least 5ⁿ. In some embodiments, the enrichment is at least 6ⁿ. In some embodiments, the enrichment is at least 7ⁿ. In some embodiments, the enrichment is at least 8ⁿ. In some embodiments, the enrichment is at least 9ⁿ. In some embodiments, the enrichment is at least 10ⁿ. In some embodiments, the enrichment is at least 15ⁿ. In some embodiments, the enrichment is at least 20ⁿ. In some embodiments, the enrichment is at least 25ⁿ. In some embodiments, the enrichment is at least 30ⁿ. In some embodiments, the enrichment is at least 40ⁿ. In some embodiments, the enrichment is at least 50ⁿ. In some embodiments, the enrichment is at least 100ⁿ. In some embodiments, enrichment is measured by increase of the fraction of oligonucleotides of the particular oligonucleotide type in oligonucleotides that have the base sequence, the pattern of backbone linkages, and the pattern of backbone phosphorus modifications of the particular oligonucleotide type. In some embodiments, an enrichment is measured by decrease of the fraction of oligonucleotides that have the base sequence, the pattern of backbone linkages, and the pattern of backbone phosphorus modifications of the particular oligonucleotide type but are not of the particular oligonucleotide type in oligonucleotides that have the base sequence, the pattern of backbone linkages, and the pattern of backbone phosphorus modifications of the particular oligonucleotide type.

[0060] In some embodiments, a composition further comprises a targeting component. A targeting component can be either conjugated or not conjugated to a lipid or a biologically active agent. In some embodiments, a targeting component is conjugated to a biologically active agent. In some embodiments, a biologically active agent is conjugated to both a lipid and a targeting component. Various targeting components can be used in accordance with the present disclosure, e.g., lipids, antibodies, peptides, carbohydrates, etc.

[0061] In some embodiments, the present disclosure encompasses the use of a composition comprising a lipid and a biologically active agent. In some embodiments, the present disclosure provides methods for delivering a biologically active agent to a target location comprising administering a provided composition. In some embodiments, a provided method delivers a biologically active agent into a cell. In some embodiments, a provided method delivers a biologically active agent into a muscle cell. In some embodiments, a provided method delivers a biologically active agent into a cell within a tissue. In some embodiments, a provided method delivers a biologically active agent into a cell within an organ. In some embodiments, a provided method delivers a biologically active agent into a cell within a subject, comprising administering to the subject a provided composition. In some embodiments, a provided method delivers a biologically active agent into cytoplasm. In some embodiments, a provided method delivers a biologically active agent into nucleus.

[0062] In some embodiments, the present disclosure pertains to methods related to the delivery of a biologically active agent to a muscle cell or tissue, or a muscle cell or tissue in a mammal (e.g., a human subject), which method pertains to a use of a composition comprising a biologically active agent and a lipid and any one or more additional components selected from: a polynucleotide, a dye, an intercalating agent (e.g. an acridine), carbonic anhydrase inhibitor, a cross-linker (e.g. psoralene, or mitomycin C), a porphyrin (e.g., TPPC4, texaphyrin, or Sapphyrin), a polycyclic aromatic hydrocarbon (e.g., phenazine, or dihydrophenazine), an artificial endonuclease, a chelating agent, EDTA, an alkylating agent, a phosphate, an amino, a mercapto, a PEG (e.g., PEG-40K), MPEG, [MPEG]₂, a polyamino, an alkyl, a substituted alkyl, a radiolabeled marker, an enzyme, a hapten (e.g. biotin), a transport/absorption facilitator (e.g., aspirin, vitamin E, or folic acid), a synthetic ribonuclease, a protein, e.g., a glycoprotein, or peptide, e.g., a molecule having a specific affinity for a co-ligand, or antibody e.g., an antibody, a hormone, a hormone receptor, a non-peptidic species, a lipid, a lectin, a carbohydrate, a vitamin, a cofactor, or a drug. In some embodiments, the present disclosure pertains to compositions or methods related to a composition comprising a biologically active agent and a lipid comprising a C₁₀-C₈₀ linear, saturated or partially unsaturated, aliphatic chain. In some embodiments, the present disclosure pertains to compositions or methods related to a composition comprising a biologically active agent and a lipid comprising a C₁₀-C₈₀ linear, saturated or partially unsaturated, aliphatic chain, optionally substituted with one or more C₁₋₄ aliphatic group. In some embodiments, the present disclosure pertains to compositions or methods related to a composition comprising a biologically active agent and a lipid comprising a C₁₀-C₆₀ linear, saturated or partially unsaturated, aliphatic chain. In some embodiments, the present disclosure pertains to compositions or methods related to a composition comprising a biologically active agent and a lipid comprising a C₁₀-C₆₀ linear, saturated or partially unsaturated, aliphatic chain, optionally substituted with one or more C₁₋₄ aliphatic group. In some embodiments, the present disclosure pertains to compositions or methods related to a composition comprising a biologically active agent and a lipid comprising a C₁₀-C₄₀ linear, saturated or partially unsaturated, aliphatic chain. In some embodiments, the present disclosure pertains to compositions or methods related to a composition comprising a biologically active agent and a lipid comprising a C₁₀-C₄₀ linear, saturated or partially unsaturated, aliphatic chain, optionally substituted with one or more C₁₋₄ aliphatic group. In some embodiments, the present disclosure provides chirally controlled oligonucleotide compositions and a lipid selected from the group consisting of: lauric acid, myristic acid, palmitic acid, stearic acid, oleic acid, linoleic acid, alpha-linolenic acid, gamma-linolenic acid, docosahexaenoic acid (cis-DHA), turbinaric acid and dilinoleyl, wherein the composition is suitable for delivery of the oligonucleotide to a muscle cell or tissue, or a muscle cell or tissue in a mammal (e.g., a human subject). In some embodiments, a biologically active agent is an oligonucleotide comprising one or more chiral internucleotidic linkages, and a provided composition is a chirally controlled oligonucleotide composition of the oligonucleotide. In some embodiments, a biologically active agent is an oligonucleotide comprising one or more chiral internucleotidic linkages, and a provided composition is a non-chirally controlled oligonucleotide composition of the oligonucleotide.

[0063] In some embodiments, the present disclosure pertains to a method of delivering a biologically active agent to a cell or tissue, wherein the method comprises steps of: providing a composition comprising a biologically active agent and a lipid; and contacting the cell or tissue with the composition; in some embodiments, the present disclosure pertains to a method of administering a biologically active agent to a subject, wherein the method comprises steps of: providing a composition comprising a biologically active agent and a lipid; and administering the composition to the subject. In some embodiments, a lipid comprises a C₁₀-C₈₀ linear, saturated or partially unsaturated, aliphatic chain. In some embodiments, a lipid comprises a C₁₀-C₈₀ linear, saturated or partially unsaturated, aliphatic chain, optionally substituted with one or more C₁₋₄ aliphatic group. In some embodiments, a lipid comprises a C₁₀-C₆₀ linear, saturated or partially unsaturated, aliphatic chain. In some embodiments, a lipid comprises a C₁₀-C₆₀ linear, saturated or partially unsaturated, aliphatic chain, optionally substituted with one or more C₁₋₄ aliphatic group. In some embodiments, a lipid comprises a C₁₀-C₄₀ linear, saturated or partially unsaturated, aliphatic chain. In some embodiments, a lipid comprises a C₁₀-C₄₀ linear, saturated or partially unsaturated, aliphatic chain, optionally substituted with one or more C₁₋₄ aliphatic group. In various embodiments, the lipid is selected from the group consisting of: lauric acid, myristic acid, palmitic acid, stearic acid, oleic acid, linoleic acid, alpha-linolenic acid, gamma-linolenic acid, docosahexaenoic acid (cis-DHA), turbinaric acid and dilinoleyl. In some embodiments, a biologically active agent is selected from the group consisting of: a small molecule, a peptide, a protein, a component of a CRISPR-Cas system, a carbohydrate, a therapeutic agent, a chemotherapeutic agent, a vaccine, a nucleic acid, and a lipid. In some embodiments, a nucleic acid is an oligonucleotide, an antisense oligonucleotide, an RNAi agent, a miRNA, immunomodulatory nucleic acid, an aptamer, a Piwi-interacting RNA (piRNA), a small nucleolar RNA (snoRNA), a ribozyme, a mRNA, a lncRNA, a ncRNA, an antigomir (e.g., an antagonist to a miRNA, lncRNA, ncRNA or other nucleic acid), a plasmid, a vector, or a portion thereof. In some embodiments, a provided composition is a chirally controlled oligonucleotide composition of a nucleic acid which comprises one or more chiral internucleotidic linkages. In various embodiments, the extra-hepatic cell or tissue is a muscle cell or tissue. In various embodiments, a muscle cell or tissue is in a subject. In various embodiments, a muscle cell or tissue is in a subject suffering from a muscle-related disease or disorder. In various embodiments, a muscle-related disorder is sarcopenia, a muscle movement disorder, a muscle wasting-related disorder, muscle degeneration, muscle weakness, muscular dystrophy, Duchenne muscular dystrophy, heart failure, breathing disorder, skeletal muscle degeneration caused by malnutrition and disease, a muscle-related disease related to impaired insulin-dependent signaling, amyotrophic lateral sclerosis, spinal muscle atrophy and spinal cord injury, ischemic muscle disease. In some embodiments, the present disclosure pertains to a method of administering a nucleic acid (as a non-limiting example, an oligonucleotide or a stereodefined oligonucleotide) to a muscle cell or tissue in a subject, wherein the subject is afflicted with a muscle-related disease or disorder, wherein the method comprises steps of: providing a composition comprising a lipid and the nucleic acid, and administering a therapeutically effective amount of the composition to the subject.

[0064] In some embodiments, a biologically active agent is an oligonucleotide, whose sequence is or comprises an element that is substantially complementary to a targeted element in a cellular nucleic acid. In some embodiments, a targeted element is or comprises a sequence element that is associated with a muscle disease, disorder or condition. In some embodiments, a muscle disease, disorder or condition is DMD. In some embodiments, a cellular nucleic acid is or comprises a transcript. In some embodiments, a cellular nucleic acid is or comprises a primary transcript. In some embodiments, a cellular nucleic acid is or comprises a genomic nucleic acid.

[0065] In some embodiments, the present disclosure provides a composition comprising a lipid and a biologically active agent.

[0066] In some embodiments, the present disclosure provides a composition comprising a lipid and a biologically active agent, characterized in that the composition delivers the biologically active agent into cells.

[0067] In some embodiments, a composition delivers the biologically active agent into the cytoplasm of the cells.

[0068] In some embodiments, a composition delivers the biologically active agent into the nucleus of the cells.

[0069] In some embodiments, the present disclosure provides a composition comprising a lipid and a biologically active agent, wherein the composition delivers the biologically active agent into cells to a level higher than that observed for the biologically active agent absent the lipid.

[0070] In some embodiments, the present disclosure provides a composition comprising a lipid and a biologically active agent, wherein the composition is characterized in that it delivers the biologically active agent into muscle cells.

[0071] In some embodiments, a composition delivers the biologically active agent into the cytoplasm of the muscle cells.

[0072] In some embodiments, a composition delivers the biologically active agent into the nucleus of the muscle cells.

[0073] In some embodiments, a composition is characterized in that when administered to a subject, the composition delivers the biologically active agent to a muscle cell in the subject.

[0074] In some embodiments, a composition delivers the biologically active agent into the cytoplasm of the muscle cells.

[0075] In some embodiments, a composition delivers the biologically active agent into the nucleus of the muscle cells.

[0076] In some embodiments, the present disclosure provides a composition for delivery of a biologically active agent to a muscle cell or tissue, comprising a lipid and the biologically active agent.

[0077] In some embodiments, the present disclosure provides a composition comprising a biologically active agent and a lipid selected from the list of: lauric acid, myristic acid, palmitic acid, stearic acid, oleic acid, linoleic acid, alpha-linolenic acid, gamma-linolenic acid, docosahexaenoic acid (cis-DHA), turbinaric acid and dilinoleyl.

[0078] In some embodiments, the present disclosure provides a composition comprising a biologically active agent and a lipid selected from:

[chemical structure]

[0079] In some embodiments, the present disclosure provides a composition comprising a biologically active agent and a lipid,

[0080] wherein the lipid comprises a C₁₀-C₄₀ linear, saturated or partially unsaturated, aliphatic chain, optionally substituted with one or more C₁₋₄ aliphatic group,

[0081] wherein the biologically active agent is selected from the group consisting of: a small molecule, a peptide, a protein, a component of a CRISPR-Cas system, a carbohydrate, a therapeutic agent, a chemotherapeutic agent, a vaccine, a nucleic acid, and a lipid.

[0082] In some embodiments, the present disclosure provides a composition comprising a nucleic acid and a lipid, for delivery of the lipid to a muscle cell or tissue.

[0083] In some embodiments, the present disclosure provides an oligonucleotide composition comprising a plurality of oligonucleotides, which share:
[0084] 1) a common base sequence;
[0085] 2) a common pattern of backbone linkages; and
[0086] 3) a common pattern of backbone phosphorus modifications;
   wherein one or more oligonucleotides of the plurality are individually conjugated to a lipid.

[0087] In some embodiments, the present disclosure provides a chirally controlled oligonucleotide composition comprising a plurality of oligonucleotides, which share:
[0088] 1) a common base sequence;
[0089] 2) a common pattern of backbone linkages; and
[0090] 3) a common pattern of backbone phosphorus modifications;
   wherein:

[0091] the composition is chirally controlled in that the plurality of oligonucleotides share the same stereochemistry at one or more chiral internucleotidic linkages;

[0092] one or more oligonucleotides of the plurality are individually conjugated to a lipid; and

[0093] one or more oligonucleotides of the plurality are optionally and individually conjugated to a targeting compound or moiety.

[0094] In some embodiments, an oligonucleotide comprises a sequence which is substantially complementary to that of a targeted element in a nucleic acid in a cell.

[0095] In some embodiments, an oligonucleotide comprises a sequence which is substantially complementary to that of a targeted element in a nucleic acid in a cell in a subject.

[0096] In some embodiments, an oligonucleotide comprises a sequence which is substantially complementary to that of a targeted element in a nucleic acid in a cell, wherein the nucleic acid is genomic.

[0097] In some embodiments, an oligonucleotide comprises a sequence which is substantially complementary to that of a targeted element in a nucleic acid in a cell in a subject, wherein the nucleic acid is genomic.

[0098] In some embodiments, an oligonucleotide comprises a sequence which is substantially complementary to that of a targeted element in a nucleic acid in a cell, wherein the targeted element is a mRNA or a portion thereof.

[0099] In some embodiments, an oligonucleotide comprises a sequence which is substantially complementary to that of a targeted element in a nucleic acid in a cell in a subject, wherein the targeted element is a mRNA or a portion thereof.

[0100] In some embodiments, an oligonucleotide comprises a sequence which is substantially complementary to that of a targeted element in a nucleic acid in a cell, wherein the targeted element is associated with a disease or disorder.

[0101] In some embodiments, an oligonucleotide comprises a sequence which is substantially complementary to that of a targeted element in a nucleic acid in a cell in a subject, wherein the targeted element is associated with a disease or disorder.

[0102] In some embodiments, an oligonucleotide comprises a sequence which is substantially complementary to that of a targeted element in a nucleic acid in a muscle cell, wherein the targeted element is associated with a muscle-related disease or disorder.

[0103] In some embodiments, an oligonucleotide comprises a sequence which is substantially complementary to that of a targeted element in a nucleic acid in a muscle cell in a subject, wherein the targeted element is associated with a muscle-related disease or disorder.

[0104] In some embodiments, a plurality of oligonucleotides share the same stereochemistry at five or more chiral internucleotidic linkages.

[0105] In some embodiments, a plurality of oligonucleotides share the same stereochemistry at ten or more chiral internucleotidic linkages.

[0106] In some embodiments, a plurality of oligonucleotides share the same stereochemistry at each of the chiral internucleotidic linkages so that they share a common pattern of backbone chiral centers.

[0107] In some embodiments, one or more oligonucleotides of the plurality are independently conjugated to a lipid through a 5′-OH on the oligonucleotide.

[0108] In some embodiments, one or more oligonucleotides of the plurality are independently conjugated to a lipid through a 3′-OH on the oligonucleotide.

[0109] In some embodiments, each oligonucleotide of the plurality is individually conjugated to a lipid.

[0110] In some embodiments, each oligonucleotide of the plurality is individually conjugated to the same lipid.

[0111] In some embodiments, the present disclosure provides a composition comprising a biologically active agent and a lipid, wherein the agent is any agent disclosed herein, and wherein the lipid is any lipid disclosed herein.

[0112] In some embodiments, the present disclosure provides a method of delivering an oligonucleotide to a muscle cell or tissue in a human subject, comprising:
[0113] (a) Providing a composition or method of any one embodiment; and
[0114] (b) Administering the composition to the human subject such that the oligonucleotide is delivered to a muscle cell or tissue in the subject.

[0115] In some embodiments, the present disclosure provides a method for delivering a biologically active agent to a muscle cell or tissue comprising preparing a composition according to any one of the embodiments and treating [contacting] the cell or tissue with the composition.

[0116] In some embodiments, the present disclosure provides a method of modulating the level of a transcript or gene product of a gene in a cell, the method comprising the step of contacting the cell with a composition according to any one of the embodiments, wherein the biologically active agent is capable of modulating the level of the transcript or gene product.

[0117] In some embodiments, the present disclosure provides a method for inhibiting expression of a gene in a muscle cell or tissue comprising preparing a composition according to any one of the embodiments and treating the muscle cell or tissue with the composition.

[0118] In some embodiments, the present disclosure provides a method for inhibiting expression of a gene in a muscle cell or tissue in a mammal comprising preparing a composition according to any one of the embodiments and administering the composition to the mammal.

[0119] In some embodiments, the present disclosure provides a method of treating a disease that is caused by the over-expression of one or several proteins in a muscle cell or tissue in a subject, said method comprising the administration of a composition according to any one of the embodiments to the subject.

[0120] In some embodiments, the present disclosure provides a method of treating a disease that is caused by a reduced, suppressed or missing expression of one or several proteins in a subject, said method comprising the administration of a composition according to any one of the embodiments to the subject.

[0121] In some embodiments, the present disclosure provides a method for generating an immune response in a subject, said method comprising the administration of a composition according to any one of the embodiments to the subject, wherein the biologically active compound is an immunomodulating nucleic acid.

[0122] In some embodiments, the present disclosure provides a method for treating a sign and/or symptom of a disease, disorder, or condition in a subject selected from cancer, a proliferative disease, disorder, or condition, a metabolic disease, disorder, or condition, an inflammatory disease, disorder, or condition, and a viral infection by providing a composition or method of any one of the embodiments and administering the composition to the subject.

[0123] In some embodiments, the present disclosure provides a method of modulating the amount of exon skipping in a cell, the method comprising the step of contacting the cell with a composition according to any one of the embodiments, wherein the biologically active agent is capable of modulating the amount of exon skipping.

[0124] In some embodiments, the present disclosure provides a method of administering a biologically active agent to a subject in need thereof, comprising steps of providing a composition comprising the agent a lipid, and administering the composition to the subject, wherein the agent is any agent disclosed herein, and wherein the lipid is any lipid disclosed herein.

[0125] In some embodiments, the present disclosure provides a method of treating a disease in a subject, the method comprising steps of providing a composition comprising the agent a lipid, and administering a therapeutically effective amount of the composition to the subject, wherein the agent is any agent disclosed herein, and wherein the lipid is any lipid disclosed herein, and wherein the disease is any disease disclosed herein.

[0126] In some embodiments, a lipid comprises an optionally substituted C₁₀-C₄₀ saturated or partially unsaturated aliphatic chain.

[0127] In some embodiments, a lipid comprises an optionally substituted C₁₀-C₄₀ linear, saturated or partially unsaturated, aliphatic chain.

[0128] In some embodiments, a lipid comprises a C₁₀-C₄₀ linear, saturated or partially unsaturated, aliphatic chain, optionally substituted with one or more C₁₋₄ aliphatic group.

[0129] In some embodiments, a lipid comprises an unsubstituted C₁₀-C₄₀ linear, saturated or partially unsaturated, aliphatic chain.

[0130] In some embodiments, a lipid comprises no more than one optionally substituted C₁₀-C₄₀ linear, saturated or partially unsaturated, aliphatic chain.

[0131] In some embodiments, a lipid comprises two or more optionally substituted C₁₀-C₄₀ linear, saturated or partially unsaturated, aliphatic chain.

[0132] In some embodiments, a lipid comprises no tricyclic or polycyclic moiety.

[0133] In some embodiments, a lipid has the structure of R¹—COOH, wherein R¹ is an optionally substituted C₁₀-C₄₀ saturated or partially unsaturated aliphatic chain.

[0134] In some embodiments, a lipid is conjugated through its carboxyl group.

[0135] In some embodiments, a lipid is selected from:

[chemical structure]

[0136] In some embodiments, a lipid is conjugated to the biologically active agent.

[0137] In some embodiments, a lipid is directly conjugated to the biologically active agent.

[0138] In some embodiments, a lipid is conjugated to the biologically active agent via a linker.

[0139] In some embodiments, a linker is selected from: an uncharged linker; a charged linker; a linker comprising an alkyl; a linker comprising a phosphate; a branched linker; an unbranched linker; a linker comprising at least one cleavage group; a linker comprising at least one redox cleavage group; a linker comprising at least one phosphate-based cleavage group; a linker comprising at least one acid-cleavage group; a linker comprising at least one ester-based cleavage group; and a linker comprising at least one peptide-based cleavage group.

[0140] In some embodiments, a nucleic acid is an oligonucleotide, an antisense oligonucleotide, an RNAi agent, a miRNA, splice switching oligonucleotide (SSO), immunomodulatory nucleic acid, an aptamer, a ribozyme, a mRNA, a lncRNA, a ncRNA, an antigomir (e.g., an antagonist to a miRNA, lncRNA, ncRNA or other nucleic acid), a plasmid, a vector, or a portion thereof.

[0141] In some embodiments, a RNAi agent is a siRNA, a shRNA, a miRNA, a sisiRNA, a meroduplex RNA (mdRNA), a DNA-RNA chimera, a siRNA comprising two mismatches (or more mismatches), a neutral siRNA, an aiRNA, or a siRNA comprising a terminal or internal spacer.

[0142] In some embodiments, each oligonucleotide of the plurality is individually conjugated to the same lipid at the same location.

[0143] In some embodiments, a lipid is conjugated to an oligonucleotide through a linker.

[0144] In some embodiments, one or more oligonucleotides of the plurality are independently conjugated to a targeting compound or moiety.

[0145] In some embodiments, one or more oligonucleotides of the plurality are independently conjugated to a lipid and a targeting compound or moiety.

[0146] In some embodiments, one or more oligonucleotides of the plurality are independently conjugated to a lipid at one end and a targeting compound or moiety at the other.

[0147] In some embodiments, oligonucleotides of the plurality share the same chemical modification patterns.

[0148] In some embodiments, oligonucleotides of the plurality share the same chemical modification patterns comprising one or more base modifications.

[0149] In some embodiments, oligonucleotides of the plurality share the same chemical modification patterns comprising one or more sugar modifications.

[0150] In some embodiments, a common base sequence is capable of hybridizing with a transcript in a muscle cell, which transcript contains a mutation that is linked to a muscle disease, or whose level, activity and/or distribution is linked to a muscle disease.

[0151] In some embodiments, a common base sequence is capable of hybridizing with a transcript in a muscle cell, and the composition is characterized in that when it is contacted with the transcript in a transcript splicing system, splicing of the transcript is altered relative to that observed under reference conditions selected from the group consisting of absence of the composition, presence of a reference composition, and combinations thereof.

[0152] In some embodiments, a common base sequence hybridizes with a transcript of dystrophin, myostatin, Huntingtin, a myostatin receptor, ActRIIB, ActRIIA, DMPK, Malat1, SMN2, dystrophia myotonica protein kinase (DMPK), Proprotein convertase subtilisin/kexin type 9 (PCSK9), SMAD7 or KRT14 (Keratin 14).

[0153] In some embodiments, a common base sequence hybridizes with a transcript of dystrophin.

[0154] In some embodiments, a common base sequence hybridizes with a transcript of dystrophin, and the composition increases the production of one or more functional or partially functional proteins encoded by dystrophin.

[0155] In some embodiments, an oligonucleotide or oligonucleotides is or are splice switching oligonucleotide or oligonucleotides.

[0156] In some embodiments, a plurality of oligonucleotides share a common pattern of sugar modification, which comprises 3 or more 2′-F.

[0157] In some embodiments, a plurality of oligonucleotides share a common pattern of sugar modification, which comprises 3 or more consecutive 2′-F.

[0158] In some embodiments, a plurality of oligonucleotides share a common pattern of sugar modification, which comprises 3 or more consecutive 2′-F within the 10 nucleotide at the 5′-end.

[0159] In some embodiments, a plurality of oligonucleotides share a common pattern of sugar modification, which comprises 3 or more 2′-F within the 10 nucleotide at the 5′-end.

[0160] In some embodiments, a plurality of oligonucleotides share a common pattern of sugar modification, which comprises 3 or more consecutive 2′-F at the 5′-end.

[0161] In some embodiments, a plurality of oligonucleotides share a common pattern of sugar modification, which comprises 5 or more consecutive 2′-F within the first 10 nucleotide at the 3′-end.

[0162] In some embodiments, a plurality of oligonucleotides share a common pattern of sugar modification, which comprises 5 or more 2′-F within the 10 nucleotide at the 3′-end.

[0163] In some embodiments, a plurality of oligonucleotides share a common pattern of sugar modification, which comprises 7 or more consecutive 2′-F at the 3′-end.

[0164] In some embodiments, a plurality of oligonucleotides share a common pattern of sugar modification, which comprises 3 or more consecutive 2′-F at the 5′-end, 3 or more consecutive 2′-F at the 3′-end, and 3 or more 2′-OR between the 5′-end 2′-F and the 3′-end 2′-F modifications.

[0165] In some embodiments, a plurality of oligonucleotides share a common pattern of sugar modification, which comprises 3 or more 2′-F at the 5′-end, 3 or more 2′-F at the 3′-end, and 3 or more 2′-OR between the 5′-end 2′-F and the 3′-end 2′-F modifications.

[0166] In some embodiments, a plurality of oligonucleotides share a common pattern of sugar modification, which comprises 5 or more 2′-F within the 10 nucleotides at the 5′-end.

[0167] In some embodiments, a plurality of oligonucleotides share a common pattern of sugar modification, which comprises 3 or more consecutive 2′-F at the 5′-end.

[0168] In some embodiments, a plurality of oligonucleotides share a common pattern of sugar modification, which comprises 7 or more 2′-F within the 10 nucleotides at the 3′-end.

[0169] In some embodiments, a plurality of oligonucleotides share a common pattern of sugar modification, which comprises 5 or more consecutive 2′-F within the 10 nucleotides at the 3′-end.

[0170] In some embodiments, a plurality of oligonucleotides share a common pattern of sugar modification, which comprises 7 or more consecutive 2′-F at the 3′-end.

[0171] In some embodiments, a plurality of oligonucleotides comprises a 5′-wing-core-wing-3′ structure, wherein each wing region independently comprises 3 to 10 nucleosides, and the core region independently comprises 3 to 10 nucleosides.

[0172] In some embodiments, a core comprises at least one internucleotidic linkage which is chirally controlled (e.g., a phosphorothioate in Sp or Rp configuration) and at least one internucleotidic linkage which is not chiral (e.g., a phosphodiester or phosphorodithioate). In some embodiments, a core comprises at least one internucleotidic linkage which is chirally controlled phosphorothioate in Sp configuration and at least one internucleotidic linkage which is not chiral (e.g., a phosphodiester or phosphorodithioate). In some embodiments, each wing region comprises no modified sugar moieties. In some embodiments, a core region comprises one or more natural phosphate linkages. In some embodiments, each internucleotidic linkage following a core nucleoside is a natural phosphate linkage. In some embodiments, a wing comprises at least one internucleotidic linkage which is chirally controlled (e.g., a phosphorothioate in Sp or Rp configuration) and at least one internucleotidic linkage which is not chiral (e.g., a phosphodiester or phosphorodithioate). In some embodiments, a wing comprises at least one internucleotidic linkage which is chirally controlled phosphorothioate in Sp configuration and at least one internucleotidic linkage which is not chiral (e.g., a phosphodiester or phosphorodithioate). In some embodiments, a wing comprises one or more modified internucleotidic linkages. In some embodiments, each internucleotidic linkage following a core nucleoside is a modified internucleotidic linkage.

[0173] In some embodiments, a 5′-wing region comprises 3 or more 2′-F.

[0174] In some embodiments, a 5′-wing region comprises 3 or more consecutive 2′-F.

[0175] In some embodiments, a 5′-wing region comprises 10% or more 2′-F.

[0176] In some embodiments, each sugar of a 5′-wing region comprises a 2′-F.

[0177] In some embodiments, a 5′-wing region comprises 3 or more chiral internucleotidic linkages.

[0178] In some embodiments, a 5′-wing region comprises 3 or more consecutive internucleotidic linkages.

[0179] In some embodiments, a 5′-wing region comprises 10% or more internucleotidic linkages.

[0180] In some embodiments, each internucleotidic linkage of a 5′-wing region is chiral.

[0181] In some embodiments, each internucleotidic linkage of a 5′-wing region is a phosphorothioate linkage.

[0182] In some embodiments, a 5′-wing region comprises 5 or more Rp chiral internucleotidic linkages.

[0183] In some embodiments, a 5′-wing region comprises 5 or more Rp consecutive internucleotidic linkages.

[0184] In some embodiments, a 5′-wing region comprises 10% or more Rp internucleotidic linkages.

[0185] In some embodiments, each internucleotidic linkage of a 5′-wing region is Rp.

[0186] In some embodiments, a 3′-wing region comprises 3 or more 2′-F.

[0187] In some embodiments, a 3′-wing region comprises 5 or more consecutive 2′-F.

[0188] In some embodiments, a 3′-wing region comprises 10% or more 2′-F.

[0189] In some embodiments, each sugar of a 3′-wing region comprises a 2′-F.

[0190] In some embodiments, a 3′-wing region comprises 3 or more chiral internucleotidic linkages.

[0191] In some embodiments, a 3′-wing region comprises 5 or more consecutive internucleotidic linkages.

[0192] In some embodiments, a 3′-wing region comprises 10% or more internucleotidic linkages.

[0193] In some embodiments, each internucleotidic linkage of a 3′-wing region is chiral.

[0194] In some embodiments, each internucleotidic linkage of a 3′-wing region is a phosphorothioate linkage.

[0195] In some embodiments, a 3′-wing region comprises 3 or more Rp chiral internucleotidic linkages.

[0196] In some embodiments, a 3′-wing region comprises 5 or more Rp consecutive internucleotidic linkages.

[0197] In some embodiments, a 3′-wing region comprises 10% or more Rp internucleotidic linkages.

[0198] In some embodiments, each internucleotidic linkage of a 3′-wing region is Rp.

[0199] In some embodiments, a 5′-wing and the 3′-wing have the same length, pattern of chemical modifications, pattern of backbone internucleotidic linkages, and pattern of backbone chiral centers.

[0200] In some embodiments, an internucleotidic linkage between the 5′-wing region and the core region is a chiral internucleotidic linkage.

[0201] In some embodiments, an internucleotidic linkage between the 5′-wing region and the core region is a phosphorothioate linkage.

[0202] In some embodiments, an internucleotidic linkage between the 5′-wing region and the core region is an Rp phosphorothioate linkage.

[0203] In some embodiments, an internucleotidic linkage between the 3′-wing region and the core region is a chiral internucleotidic linkage.

[0204] In some embodiments, an internucleotidic linkage between the 3′-wing region and the core region is a phosphorothioate linkage.

[0205] In some embodiments, an internucleotidic linkage between the 3′-wing region and the core region is an Rp phosphorothioate linkage.

[0206] In some embodiments, a core region comprises 3 or more 2′-OR.

[0207] In some embodiments, a core region comprises 5 or more consecutive 2′-OR.

[0208] In some embodiments, a core region comprises 10% or more 2′-OR.

[0209] In some embodiments, each sugar of a core region comprises a 2′-OR.

[0210] In some embodiments, a core region comprises 3 or more chiral internucleotidic linkages.

[0211] In some embodiments, a core region comprises 5 or more consecutive internucleotidic linkages.

[0212] In some embodiments, a core region comprises 10% or more internucleotidic linkages.

[0213] In some embodiments, each internucleotidic linkage of a core region is chiral.

[0214] In some embodiments, each internucleotidic linkage of a core region is a phosphorothioate linkage.

[0215] In some embodiments, a core region comprises 3 or more Sp chiral internucleotidic linkages.

[0216] In some embodiments, a core region comprises 5 or more Sp consecutive internucleotidic linkages.

[0217] In some embodiments, a core region comprises 10% or more Sp internucleotidic linkages.

[0218] In some embodiments, each internucleotidic linkage of a core region is Sp.

[0219] In some embodiments, a 5′-wing region comprises 5 or more Sp chiral internucleotidic linkages.

[0220] In some embodiments, a 5′-wing region comprises 5 or more Sp consecutive internucleotidic linkages.

[0221] In some embodiments, a 5′-wing region comprises 10% or more Sp internucleotidic linkages.

[0222] In some embodiments, each internucleotidic linkage of a 5′-wing region is Sp.

[0223] In some embodiments, a 3′-wing region comprises 3 or more Sp chiral internucleotidic linkages.

[0224] In some embodiments, a 3′-wing region comprises 5 or more Sp consecutive internucleotidic linkages.

[0225] In some embodiments, a 3′-wing region comprises 10% or more Sp internucleotidic linkages.

[0226] In some embodiments, each internucleotidic linkage of a 3′-wing region is Sp.

[0227] In some embodiments, an internucleotidic linkage between the 5′-wing region and the core region is an Sp phosphorothioate linkage.

[0228] In some embodiments, an internucleotidic linkage between the 3′-wing region and the core region is an Sp phosphorothioate linkage.

[0229] In some embodiments, a nucleic acid is a splice switching oligonucleotide (SSO).

[0230] In some embodiments, a nucleic acid is a splice switching oligonucleotide (SSO) which targets dystrophin.

[0231] In some embodiments, a nucleic acid is a splice switching oligonucleotide (SSO) which targets dystrophin exon 51, 45, 53 or 44.

[0232] In some embodiments, a nucleic acid is a splice switching oligonucleotide (SSO) which targets dystrophin exon 51.

[0233] In some embodiments, an immunomodulatory nucleic acid is a CpG oligonucleotide.

[0234] In some embodiments, an immunomodulatory nucleic acid is a CpG oligonucleotide which is capable of agonizing an immune response which is TLR9-mediated or TLR9-associated.

[0235] In some embodiments, an immunomodulatory nucleic acid is a CpG oligonucleotide which is capable of antagonizing an immune response which is TLR9-mediated or TLR9-associated.

[0236] In some embodiments, an oligonucleotide comprises a strand of about 14 to about 49 nucleotides.

[0237] Where the oligonucleotide further comprises a second strand.

[0238] In some embodiments, an oligonucleotide comprises at least one modification to a base, sugar or internucleoside linkage.

[0239] In some embodiments, a modification is a sugar modifications at the 2′ carbon.

[0240] In some embodiments, a modification is a sugar modifications at the 2′ carbon selected from: 2′-MOE, 2′-OMe, and 2′-F.

[0241] In some embodiments, a biologically active agent is a nucleic acid.

[0242] In some embodiments, a biologically active agent is an immunomodulatory nucleic acid.

[0243] In some embodiments, a biologically active agent is a CpG oligonucleotide that agonizes or antagonizes an immune response

[0244] In some embodiments, a biologically active agent is an CpG oligonucleotide that agonizes or antagonizes an immune response which is TLR9-mediated or TLR9-associated.

[0245] In some embodiments, a biologically active agent is a small molecule, and wherein the small molecule is hydrophobic

[0246] In some embodiments, a biologically active agent is a hydrophobic small molecule selected from the group consisting of a sterol and a hydrophobic vitamin.

[0247] In some embodiments, a biologically active agent is cholesterol.

[0248] In some embodiments, a biologically active agent is a protein selected from the group consisting of a nucleoprotein, a mucoprotein, a lipoprotein, a synthetic polypeptide, a small molecule linked to a protein and a glycoprotein.

[0249] In some embodiments, a biologically active agent is a nucleic acid in the form of a single stranded or partially double stranded oligomer or a polymer composed of ribonucleotides.

[0250] In some embodiments, a biologically active agent is a nucleic acid selected from the group consisting of miRNA, antisense oligonucleotides, siRNA, immune-stimulatory oligonucleotides, aptamers, Piwi-interacting RNAs (piRNAs), small nucleolar RNAs (snoRNAs), ribozymes, and plasmids encoding a specific gene or siRNA.

[0251] In some embodiments, a cell or tissue is a muscle cell or tissue.

[0252] In some embodiments, a biologically active agent is a nucleic acid.

[0253] In some embodiments, a biologically active agent is an oligonucleotide.

[0254] In some embodiments, a biologically active agent is an oligonucleotide which mediates exon skipping.

[0255] In some embodiments, a biologically active agent is a stereodefined oligonucleotide which mediates exon skipping.

[0256] In some embodiments, a disease or disorder is a muscle-related disease or disorder.

[0257] In some embodiments, a muscle-related disorder is sarcopenia, a muscle movement disorder, a muscle wasting-related disorder, muscle degeneration, muscle weakness, muscular dystrophy, Duchenne muscular dystrophy, heart failure, breathing disorder, skeletal muscle degeneration caused by malnutrition and disease, a muscle-related disease related to impaired insulin-dependent signaling, amyotrophic lateral sclerosis, spinal muscle atrophy and spinal cord injury, ischemic muscle disease.

[0258] In some embodiments, a cell or tissue is a muscle cell or tissue, wherein the biologically active agent is a stereodefined oligonucleotide which is a splice switching oligonucleotide, and wherein the subject is afflicted with a muscle disorder.

[0259] In some embodiments, a cell or tissue is a muscle cell or tissue, wherein the biologically active agent is a stereodefined oligonucleotide which is a splice switching oligonucleotide, and wherein the subject is afflicted with muscular dystrophy.

[0260] In some embodiments, a cell or tissue is a muscle cell or tissue, wherein the biologically active agent is a stereodefined oligonucleotide which is a splice switching oligonucleotide, and wherein the subject is afflicted with Duchenne muscular dystrophy.

[0261] In some embodiments, a lipid comprises an optionally substituted, C₁₀-C₈₀ saturated or partially unsaturated aliphatic group, wherein one or more methylene units are optionally and independently replaced by an optionally substituted group selected from C₁-C₆ alkylene, C₁-C₆ alkenylene, —C≡C—, a C₁-C₆ heteroaliphatic moiety, —C(R′)₂—, -Cy-, —O—, —S—, —S—S—, —N(R′)—, —C(O)—, —C(S)—, —C(NR′)—, —C(O)N(R′)—, —N(R′)C(O)N(R′)—, —N(R′)C(O)—, —N(R′)C(O)O—, —OC(O)N(R′)—, —S(O)—, —S(O)₂—, —S(O)₂N(R′)—, —N(R′)S(O)₂—, —SC(O)—, —C(O)S—, —OC(O)—, and —C(O)O—, wherein each variable is independently as defined and described herein.

[0262] In some embodiments, a lipid comprises an optionally substituted C₁₀-C₈₀ saturated or partially unsaturated, aliphatic chain.

[0263] In some embodiments, a lipid comprises an optionally substituted C₁₀-C₈₀ linear, saturated or partially unsaturated, aliphatic chain.

[0264] In some embodiments, a lipid comprises an optionally substituted C₁₀-C₆₀ saturated or partially unsaturated, aliphatic chain.

[0265] In some embodiments, a lipid comprises an optionally substituted C₁₀-C₆₀ linear, saturated or partially unsaturated, aliphatic chain.

[0266] In some embodiments, a lipid comprises an optionally substituted C₁₀-C₄₀ saturated or partially unsaturated, aliphatic chain.

[0267] In some embodiments, a lipid comprises an optionally substituted C₁₀-C₄₀ linear, saturated or partially unsaturated, aliphatic chain.

[0268] In some embodiments, a lipid comprises an optionally substituted, C₁₀-C₆₀ saturated or partially unsaturated aliphatic group, wherein one or more methylene units are optionally and independently replaced by an optionally substituted group selected from C₁-C₆ alkylene, C₁-C₆ alkenylene, —C≡C—, a C₁-C₆ heteroaliphatic moiety, —C(R′)₂—, -Cy-, —O—, —S—, —S—S—, —N(R′)—, —C(O)—, —C(S)—, —C(NR′)—, —C(O)N(R′)—, —N(R′)C(O)N(R′)—, —N(R′)C(O)—, —N(R′)C(O)O—, —OC(O)N(R′)—, —S(O)—, —S(O)₂—, —S(O)₂N(R′)—, —N(R′)S(O)₂—, —SC(O)—, —C(O)S—, —OC(O)—, and —C(O)O—, wherein each variable is independently as defined and described herein.

[0269] In some embodiments, a lipid comprises an optionally substituted C₁₀-C₈₀ saturated or partially unsaturated, aliphatic chain.

[0270] In some embodiments, a lipid comprises an optionally substituted C₁₀-C₆₀ linear, saturated or partially unsaturated, aliphatic chain.

[0271] In some embodiments, a lipid comprises an optionally substituted C₁₀-C₄₀ linear, saturated or partially unsaturated, aliphatic chain.

[0272] In some embodiments, a lipid comprises an optionally substituted, C₁₀-C₄₀ saturated or partially unsaturated aliphatic group, wherein one or more methylene units are optionally and independently replaced by an optionally substituted group selected from C₁-C₆ alkylene, C₁-C₆ alkenylene, —C≡C—, a C₁-C₆ heteroaliphatic moiety, —C(R′)₂—, -Cy-, —O—, —S—, —S—S—, —N(R′)—, —C(O)—, —C(S)—, —C(NR′)—, —C(O)N(R′)—, —N(R′)C(O)N(R′)—, —N(R′)C(O)—, —N(R′)C(O)O—, —OC(O)N(R′)—, —S(O)—, —S(O)₂—, —S(O)₂N(R′)—, —N(R′)S(O)₂—, —SC(O)—, —C(O)S—, —OC(O)—, and —C(O)O—, wherein each variable is independently as defined and described herein.

[0273] In some embodiments, a lipid comprises an optionally substituted C₁₀-C₄₀ saturated or partially unsaturated, aliphatic chain.

[0274] In some embodiments, a lipid comprises an optionally substituted C₁₀-C₄₀ linear, saturated or partially unsaturated, aliphatic chain.

[0275] In some embodiments, a composition further comprises one or more additional components selected from: a polynucleotide, carbonic anhydrase inhibitor, a dye, an intercalating agent, an acridine, a cross-linker, psoralene, mitomycin C, a porphyrin, TPPC4, texaphyrin, Sapphyrin, a polycyclic aromatic hydrocarbon phenazine, dihydrophenazine, an artificial endonuclease, a chelating agent, EDTA, an alkylating agent, a phosphate, an amino, a mercapto, a PEG, PEG-40K, MPEG, [MPEG]₂, a polyamino, an alkyl, a substituted alkyl, a radiolabeled marker, an enzyme, a hapten biotin, a transport/absorption facilitator, aspirin, vitamin E, folic acid, a synthetic ribonuclease, a protein, a glycoprotein, a peptide, a molecule having a specific affinity for a co-ligand, an antibody, a hormone, a hormone receptor, a non-peptidic species, a lipid, a lectin, a carbohydrate, a vitamin, a cofactor, or a drug.

[0276] In some embodiments, a lipid comprises a C₁₀-C₈₀ linear, saturated or partially unsaturated, aliphatic chain.

[0277] In some embodiments, a composition further comprises a linker linking the biologically active agent and the lipid, wherein the linker is selected from: an uncharged linker; a charged linker; a linker comprising an alkyl; a linker comprising a phosphate; a branched linker; an unbranched linker; a linker comprising at least one cleavage group; a linker comprising at least one redox cleavage group; a linker comprising at least one phosphate-based cleavage group; a linker comprising at least one acid-cleavage group; a linker comprising at least one ester-based cleavage group; a linker comprising at least one peptide-based cleavage group.

[0278] In some embodiments, a biologically active agent comprises or consists of or is an oligonucleotide or oligonucleotide composition or chirally controlled oligonucleotide composition.

[0279] In some embodiments, a biologically active agent comprises or consists of or is an oligonucleotide or oligonucleotide composition or chirally controlled oligonucleotide composition, wherein the sequence of the oligonucleotide comprises or consists of the sequence of any oligonucleotide described herein.

[0280] In some embodiments, a biologically active agent comprises or consists of or is an oligonucleotide or oligonucleotide composition or chirally controlled oligonucleotide composition, wherein the sequence of the oligonucleotide comprises or consists of the sequence of any oligonucleotide listed in Table 4A.

[0281] In some embodiments, a biologically active agent comprises or consists of or is an oligonucleotide or oligonucleotide composition or chirally controlled oligonucleotide composition, wherein the sequence of the oligonucleotide comprises or consists of the sequence of a splice-switching oligonucleotide.

[0282] In some embodiments, a biologically active agent comprises or consists of or is an oligonucleotide or oligonucleotide composition or chirally controlled oligonucleotide composition, wherein the sequence of the oligonucleotide comprises or consists of the sequence of an oligonucleotide capable of skipping or mediating skipping of an exon in the dystrophin gene.

[0283] In some embodiments, a biologically active agent comprises or consists of or is an oligonucleotide or oligonucleotide composition or chirally controlled oligonucleotide composition, wherein the sequence of the oligonucleotide comprises or consists of the sequence of an oligonucleotide capable of skipping or mediating skipping of exon 51 in the dystrophin gene.

[0284] In some embodiments, a biologically active agent comprises or consists of or is an oligonucleotide or oligonucleotide composition or chirally controlled oligonucleotide composition, wherein the sequence of the oligonucleotide comprises or consists of the sequence of an oligonucleotide capable of skipping or mediating skipping of exon 51, 45, 53 or 44 in the dystrophin gene.

[0285] In some embodiments, a biologically active agent comprises or consists of or is an oligonucleotide or oligonucleotide composition or chirally controlled oligonucleotide composition, wherein the sequence of the oligonucleotide comprises or consists of the sequence of any of: WV-887, WV-896, WV-1709, WV-1710, WV-1714, WV-2095, WV-2100, WV-2106, WV-2107, WV-2108, WV-2109, WV-2223, WV-2224, WV-2225, WV-2226, WV-2227, WV-2228, WV-2229, WV-2230, WV-2438, WV-2444, WV-2445, WV-2526, WV-2527, WV-2528, WV-2529, WV-2530, WV-2531, WV-2533, WV-2578, WV-2580, WV-2587, WV-3047, WV-3152, WV-3472, WV-3473, WV-3507, WV-3508, WV-3509, WV-3510, WV-3511, WV-3512, WV-3513, WV-3514, WV-3515, WV-3545, or WV-3546.

[0286] In some embodiments, a common base sequence is UCAAGGAAGAUGGCAUUUCU (SEQ ID NO: 1). In some embodiments, a common base sequence comprises UCAAGGAAGAUGGCAUUUCU (SEQ ID NO: 1), and the oligonucleotide has a length of up to 30 bases. In some embodiments, a common base sequence comprises UCAAGGAAGAUGGCAUUUCU (SEQ ID NO: 1), and the oligonucleotide has a length of up to 40 bases. In some embodiments, a common base sequence comprises UCAAGGAAGAUGGCAUUUCU (SEQ ID NO: 1), and the oligonucleotide has a length of up to 50 bases. In some embodiments, a common base sequence comprises at least 15 contiguous bases of UCAAGGAAGAUGGCAUUUCU (SEQ ID NO: 1), and the oligonucleotide has a length of up to 30 bases. In some embodiments, a common base sequence comprises at least 15 contiguous bases of UCAAGGAAGAUGGCAUUUCU (SEQ ID NO: 1), and the oligonucleotide has a length of up to 40 bases. In some embodiments, a common base sequence comprises at least 15 contiguous bases of UCAAGGAAGAUGGCAUUUCU (SEQ ID NO: 1), and the oligonucleotide has a length of up to 50 bases. In some embodiments, a common base sequence comprises a sequence having no more than 5 mismatches from the sequence of bases of UCAAGGAAGAUGGCAUUUCU (SEQ ID NO: 1), and the oligonucleotide has a length of up to 30 bases. In some embodiments, a common base sequence comprises a sequence having no more than 5 mismatches from the sequence of bases of UCAAGGAAGAUGGCAUUUCU (SEQ ID NO: 1), and the oligonucleotide has a length of up to 40 bases. In some embodiments, a common base sequence comprises a sequence having no more than 5 mismatches from the sequence of bases of UCAAGGAAGAUGGCAUUUCU (SEQ ID NO: 1), and the oligonucleotide has a length of up to 50 bases.

[0287] In some embodiments, a common base sequence is UCAAGGAAGAUGGCAUUUCU (SEQ ID NO: 1), and a common pattern of backbone chiral centers comprises at least one chirally controlled center. In some embodiments, a common base sequence comprises UCAAGGAAGAUGGCAUUUCU (SEQ ID NO: 1), the oligonucleotide has a length of up to 30 bases, and a common pattern of backbone chiral centers comprises at least one chirally controlled center. In some embodiments, a common base sequence comprises UCAAGGAAGAUGGCAUUUCU (SEQ ID NO: 1), and the oligonucleotide has a length of up to 40 bases, and a common pattern of backbone chiral centers comprises at least one chirally controlled center. In some embodiments, a common base sequence comprises UCAAGGAAGAUGGCAUUUCU (SEQ ID NO: 1), the oligonucleotide has a length of up to 50 bases, and a common pattern of backbone chiral centers comprises at least one chirally controlled center. In some embodiments, a common base sequence comprises at least 15 contiguous bases of UCAAGGAAGAUGGCAUUUCU (SEQ ID NO: 1), the oligonucleotide has a length of up to 30 bases, and a common pattern of backbone chiral centers comprises at least one chirally controlled center. In some embodiments, a common base sequence comprises at least 15 contiguous bases of UCAAGGAAGAUGGCAUUUCU (SEQ ID NO: 1), the oligonucleotide has a length of up to 40 bases, and a common pattern of backbone chiral centers comprises at least one chirally controlled center. In some embodiments, a common base sequence comprises at least 15 contiguous bases of UCAAGGAAGAUGGCAUUUCU (SEQ ID NO: 1), the oligonucleotide has a length of up to 50 bases, and a common pattern of backbone chiral centers comprises at least one chirally controlled center. In some embodiments, a common base sequence comprises a sequence having no more than 5 mismatches from the sequence of bases of UCAAGGAAGAUGGCAUUUCU (SEQ ID NO: 1), the oligonucleotide has a length of up to 30 bases, and a common pattern of backbone chiral centers comprises at least one chirally controlled center. In some embodiments, a common base sequence comprises a sequence having no more than 5 mismatches from the sequence of bases of UCAAGGAAGAUGGCAUUUCU (SEQ ID NO: 1), the oligonucleotide has a length of up to 40 bases, and a common pattern of backbone chiral centers comprises at least one chirally controlled center. In some embodiments, a common base sequence comprises a sequence having no more than 5 mismatches from the sequence of bases of UCAAGGAAGAUGGCAUUUCU (SEQ ID NO: 1), the oligonucleotide has a length of up to 50 bases, and a common pattern of backbone chiral centers comprises at least one chirally controlled center.

[0288] In some embodiments, a common base sequence is UCAAGGAAGAUGGCAUUUCU (SEQ ID NO: 1), and a common pattern of backbone chiral centers comprises at least one chirally controlled center which is a phosphorothioate in the Sp configuration. In some embodiments, a common base sequence comprises UCAAGGAAGAUGGCAUUUCU (SEQ ID NO: 1), the oligonucleotide has a length of up to 30 bases, and a common pattern of backbone chiral centers comprises at least one chirally controlled center which is a phosphorothioate in the Sp configuration. In some embodiments, a common base sequence comprises UCAAGGAAGAUGGCAUUUCU (SEQ ID NO: 1), and the oligonucleotide has a length of up to 40 bases, and a common pattern of backbone chiral centers comprises at least one chirally controlled center which is a phosphorothioate in the Sp configuration. In some embodiments, a common base sequence comprises UCAAGGAAGAUGGCAUUUCU (SEQ ID NO: 1), the oligonucleotide has a length of up to 50 bases, and a common pattern of backbone chiral centers comprises at least one chirally controlled center which is a phosphorothioate in the Sp configuration. In some embodiments, a common base sequence comprises at least 15 contiguous bases of UCAAGGAAGAUGGCAUUUCU (SEQ ID NO: 1), the oligonucleotide has a length of up to 30 bases, and a common pattern of backbone chiral centers comprises at least one chirally controlled center which is a phosphorothioate in the Sp configuration. In some embodiments, a common base sequence comprises at least 15 contiguous bases of UCAAGGAAGAUGGCAUUUCU (SEQ ID NO: 1), the oligonucleotide has a length of up to 40 bases, and a common pattern of backbone chiral centers comprises at least one chirally controlled center which is a phosphorothioate in the Sp configuration. In some embodiments, a common base sequence comprises at least 15 contiguous bases of UCAAGGAAGAUGGCAUUUCU (SEQ ID NO: 1), the oligonucleotide has a length of up to 50 bases, and a common pattern of backbone chiral centers comprises at least one chirally controlled center which is a phosphorothioate in the Sp configuration. In some embodiments, a common base sequence comprises a sequence having no more than 5 mismatches from the sequence of bases of UCAAGGAAGAUGGCAUUUCU (SEQ ID NO: 1), the oligonucleotide has a length of up to 30 bases, and a common pattern of backbone chiral centers comprises at least one chirally controlled center which is a phosphorothioate in the Sp configuration. In some embodiments, a common base sequence comprises a sequence having no more than 5 mismatches from the sequence of bases of UCAAGGAAGAUGGCAUUUCU (SEQ ID NO: 1), the oligonucleotide has a length of up to 40 bases, and a common pattern of backbone chiral centers comprises at least one chirally controlled center which is a phosphorothioate in the Sp configuration. In some embodiments, a common base sequence comprises a sequence having no more than 5 mismatches from the sequence of bases of UCAAGGAAGAUGGCAUUUCU (SEQ ID NO: 1), the oligonucleotide has a length of up to 50 bases, and a common pattern of backbone chiral centers comprises at least one chirally controlled center which is a phosphorothioate in the Sp configuration.

[0289] In some embodiments, a common base sequence is UCAAGGAAGAUGGCAUUUCU (SEQ ID NO: 1), and a common pattern of backbone chiral centers comprises at least three chirally controlled centers. In some embodiments, a common base sequence comprises UCAAGGAAGAUGGCAUUUCU (SEQ ID NO: 1), the oligonucleotide has a length of up to 30 bases, and a common pattern of backbone chiral centers comprises at least three chirally controlled centers. In some embodiments, a common base sequence comprises UCAAGGAAGAUGGCAUUUCU (SEQ ID NO: 1), and the oligonucleotide has a length of up to 40 bases, and a common pattern of backbone chiral centers comprises at least three chirally controlled centers. In some embodiments, a common base sequence comprises UCAAGGAAGAUGGCAUUUCU (SEQ ID NO: 1), the oligonucleotide has a length of up to 50 bases, and a common pattern of backbone chiral centers comprises at least three chirally controlled centers. In some embodiments, a common base sequence comprises at least 15 contiguous bases of UCAAGGAAGAUGGCAUUUCU (SEQ ID NO: 1), the oligonucleotide has a length of up to 30 bases, and a common pattern of backbone chiral centers comprises at least three chirally controlled centers. In some embodiments, a common base sequence comprises at least 15 contiguous bases of UCAAGGAAGAUGGCAUUUCU (SEQ ID NO: 1), the oligonucleotide has a length of up to 40 bases, and a common pattern of backbone chiral centers comprises at least three chirally controlled centers. In some embodiments, a common base sequence comprises at least 15 contiguous bases of UCAAGGAAGAUGGCAUUUCU (SEQ ID NO: 1), the oligonucleotide has a length of up to 50 bases, and a common pattern of backbone chiral centers comprises at least three chirally controlled centers. In some embodiments, a common base sequence comprises a sequence having no more than 5 mismatches from the sequence of bases of UCAAGGAAGAUGGCAUUUCU (SEQ ID NO: 1), the oligonucleotide has a length of up to 30 bases, and a common pattern of backbone chiral centers comprises at least three chirally controlled centers. In some embodiments, a common base sequence comprises a sequence having no more than 5 mismatches from the sequence of bases of UCAAGGAAGAUGGCAUUUCU (SEQ ID NO: 1), the oligonucleotide has a length of up to 40 bases, and a common pattern of backbone chiral centers comprises at least three chirally controlled centers. In some embodiments, a common base sequence comprises a sequence having no more than 5 mismatches from the sequence of bases of UCAAGGAAGAUGGCAUUUCU (SEQ ID NO: 1), the oligonucleotide has a length of up to 50 bases, and a common pattern of backbone chiral centers comprises at least three chirally controlled centers.

[0290] In some embodiments, a common base sequence is UCAAGGAAGAUGGCAUUUCU (SEQ ID NO: 1), and a common pattern of backbone chiral centers comprises at least five chirally controlled centers which are each a phosphorothioate in the Sp configuration. In some embodiments, a common base sequence comprises UCAAGGAAGAUGGCAUUUCU (SEQ ID NO: 1), the oligonucleotide has a length of up to 30 bases, and a common pattern of backbone chiral centers comprises at least five chirally controlled centers which are each a phosphorothioate in the Sp configuration. In some embodiments, a common base sequence comprises UCAAGGAAGAUGGCAUUUCU (SEQ ID NO: 1), and the oligonucleotide has a length of up to 40 bases, and a common pattern of backbone chiral centers comprises at least five chirally controlled centers which are each a phosphorothioate in the Sp configuration. In some embodiments, a common base sequence comprises UCAAGGAAGAUGGCAUUUCU (SEQ ID NO: 1), the oligonucleotide has a length of up to 50 bases, and a common pattern of backbone chiral centers comprises at least five chirally controlled centers which are each a phosphorothioate in the Sp configuration. In some embodiments, a common base sequence comprises at least 15 contiguous bases of UCAAGGAAGAUGGCAUUUCU (SEQ ID NO: 1), the oligonucleotide has a length of up to 30 bases, and a common pattern of backbone chiral centers comprises at least five chirally controlled centers which are each a phosphorothioate in the Sp configuration. In some embodiments, a common base sequence comprises at least 15 contiguous bases of UCAAGGAAGAUGGCAUUUCU (SEQ ID NO: 1), the oligonucleotide has a length of up to 40 bases, and a common pattern of backbone chiral centers comprises at least five chirally controlled centers which are each a phosphorothioate in the Sp configuration. In some embodiments, a common base sequence comprises at least 15 contiguous bases of UCAAGGAAGAUGGCAUUUCU (SEQ ID NO: 1), the oligonucleotide has a length of up to 50 bases, and a common pattern of backbone chiral centers comprises at least five chirally controlled centers which are each a phosphorothioate in the Sp configuration. In some embodiments, a common base sequence comprises a sequence having no more than 5 mismatches from the sequence of bases of UCAAGGAAGAUGGCAUUUCU (SEQ ID NO: 1), the oligonucleotide has a length of up to 30 bases, and a common pattern of backbone chiral centers comprises at least five chirally controlled centers which are each a phosphorothioate in the Sp configuration. In some embodiments, a common base sequence comprises a sequence having no more than 5 mismatches from the sequence of bases of UCAAGGAAGAUGGCAUUUCU (SEQ ID NO: 1), the oligonucleotide has a length of up to 40 bases, and a common pattern of backbone chiral centers comprises at least five chirally controlled centers which are each a phosphorothioate in the Sp configuration. In some embodiments, a common base sequence comprises a sequence having no more than 5 mismatches from the sequence of bases of UCAAGGAAGAUGGCAUUUCU (SEQ ID NO: 1), the oligonucleotide has a length of up to 50 bases, and a common pattern of backbone chiral centers comprises at least five chirally controlled centers which are each a phosphorothioate in the Sp configuration.

[0291] In some embodiments, a common pattern of backbone chiral centers is selected from: SSS, SSSS, SSSSS, SOS, SSOSS, SSSOSSS, SSSSOSSSS, SSSSSOSSSSS, SSSSSSOSSSSSS, SSSSSSSOSSSSSSS, SSSSSSSSOSSSSSSSS, SSSSSSSSSOSSSSSSSSS, SOSOSOSOS, SSOSOSOSOSS, SSSOSOSOSOSSS, SSSSOSOSOSOSSSS, SSSSSOSOSOSOSSSSS, SSSSSSOSOSOSOSSSSSS, SOSOSSOOS, SSOSOSSOOSS, SSSOSOSSOOSSS, SSSSOSOSSOOSSSS, SSSSSOSOSSOOSSSSS, SSSSSSOSOSSOOSSSSSS, SOSOOSOOS, SSOSOOSOOSS, SSSOSOOSOOSSS, SSSSOSOOSOOSSSS, SSSSSOSOOSOOSSSSS, SSSSSSOSOOSOOSSSSSS, SOSOSSOOS, SSOSOSSOOSO, SSSOSOSSOOSOS, SSSSOSOSSOOSOSS, SSSSSOSOSSOOSOSSS, SSSSSSOSOSSOOSOSSSS, SOSOOSOOSO, SSOSOOSOOSOS, SSSOSOOSOOSOS, SSSSOSOOSOOSOSS, SSSSSOSOOSOOSOSSS, SSSSSSOSOOSOOSOSSSS, SSOSOSSOO, SSSOSOSSOOS, SSSSOSOSSOOS, SSSSSOSOSSOOSS, SSSSSSOSOSSOOSSS, OSSSSSSOSOSSOOSSS, OOSSSSSSOSOSSOOS, OOSSSSSSOSOSSOOSS, OOSSSSSSOSOSSOOSSS, OOSSSSSSOSOSSOOSSSS, OOSSSSSSOSOSSOOSSSSS, and OOSSSSSSOSOSSOOSSSSSS, wherein O is a non-chiral center and S is a chiral center in a Sp configuration. In some embodiments, the non-chiral center is phosphodiester. In some embodiments, the chiral center in a Sp configuration is a phosphorothioate.

[0292] In some embodiments, a sequence of an oligonucleotide includes any one or more of: base sequence (including length); pattern of chemical modifications to sugar and base moieties; pattern of backbone linkages; pattern of natural phosphate linkages, phosphorothioate linkages, phosphorothioate triester linkages, and combinations thereof, pattern of backbone chiral centers; pattern of stereochemistry (Rp/Sp) of chiral internucleotidic linkages; pattern of backbone phosphorus modifications; pattern of modifications on the internucleotidic phosphorus atom, such as —S—, and -L-R¹ of formula I.

[0293] In some embodiments, a muscle cell or tissue is selected from: skeletal muscle, smooth muscle, heart muscle, thoracic diaphragm, gastrocnemius, quadriceps, triceps, and/or heart.

[0294] In some embodiments, a method delivers the biologically active agent into the cytoplasm of a cell.

[0295] In some embodiments, a method delivers the biologically active agent into the nucleus of a cell.

[0296] In some embodiments, a chiral internucleoside linkage is a phosphorothioate.

[0297] In some embodiments, a common base sequence hybridizes with a transcript of dystrophin, myostatin, Huntingtin, a myostatin receptor, ActRIIB, ActRIIA, DMPK, Malat1, SMN2, dystrophia myotonica protein kinase (DMPK), Proprotein convertase subtilisin/kexin type 9 (PCSK9), SMAD7 or KRT14 (Keratin 14).

### BRIEF DESCRIPTION OF THE DRAWINGS

[0298] FIG. 1. Exon skipping mediated by a biologically active agent, oligonucleotide WV-942 (SEQ ID NO: 206), delivered via gymnotic delivery (not conjugated to a lipid), or conjugated to a lipid (listed in Table 1).

[0299] FIG. 2. Example lipid conjugates.

[0300] FIG. 3. In vivo pharmacokinetic (PK) data related to delivery of oligonucleotide WV-942 delivered via gymnotic delivery (not conjugated to a lipid), or conjugated to a lipid, to gastrocnemius, heart and quadriceps muscle tissues. Tested articles are listed in Table 1.

[0301] FIG. 4. In vivo pharmacokinetic (PK) data related to delivery of WV-942 delivered via gymnotic delivery (not conjugated to a lipid), or conjugated to a lipid, to gastrocnemius, heart and quadriceps and diaphragm muscle tissues.

[0302] FIG. 5. Standard curves for lipid conjugates in different tissues (quadriceps and thoracic diaphragm).

[0303] FIG. 6. Standard curves for lipid conjugates in different tissues (heart and gastrocnemius).

[0304] FIG. 7. Example structures of lipids and linkers for conjugation to a biologically active agent. Abbreviation: Oligo: an example oligonucleotide.

[0305] FIG. 8. Hybridization assay to detect ASO: Sandwich. Abbreviations: B: biotin; SA: streptavidin; AP: alkaline phosphatase; ASO: antisense oligonucleotide.

[0306] FIG. 9A to 9E. LC-MS and deconvoluted mass of lipid conjugates of various oligonucleotides.

[0307] FIGS. 10A and 10B. Sequences and the chemistry of various oligonucleotides: WV395 (SEQ ID NO: 2432) and WV884 to WV897 (SEQ ID NOS 1159-1172, respectively). The suffices 0.01 and 0.02 indicate batch numbers. These include stereopure (chirally pure) oligonucleotides or oligonucleotide compositions, including 2′-OMe modifications. FIG. 10B discloses SEQ ID NO: 206.

[0308] FIGS. 11A and 11B. Ability of various oligonucleotides to induce skipping of exon 51 of human dystrophin. FIG. 11B is a compilation of data, including three or more replicates. Controls: WV-942, WV-1714, and untreated; Concentration: 10 uM; Duration: 4 days in differentiation medium; treatment was gymnotic (without transfection reagent); Cells: Del 48-50 [Primary human myoblasts from a patient with (dystrophin deletion exon 48-50), DL 589.2 (dystrophin deletion exon 51-55)].

[0309] FIGS. 12A and 12B. Composition of PS (phosphorothioates) and 2′-F on the wings of various oligonucleotides, including WV-2095 to WV-2109 (SEQ ID NOS: 1144-1158, respectively). WV-2106 to WV-2109 are hemimers. FIG. 12B discloses SEQ ID NO: 434.

[0310] FIGS. 13A and 13B. Ability of various oligonucleotides to induce skipping of exon 51 of dystrophin. FIG. 13B shows additional data for WV-1714 (SEQ ID NO: 434). WV-1683 (SEQ ID NO: 426), a negative control in this experiment, targets mouse exon 23.

[0311] FIGS. 14A and 14B. Sequence and chemistry of various oligonucleotides, WV-1108 (SEQ ID NO: 1226) and WV-2381 to WV-2385 (SEQ ID NOS 1268-1272, respectively). These have PS (phosphorothioates) in the wings and PO (phosphorodiesters) in the core. FIG. 14B discloses SEQ ID NO: 474.

[0312] FIG. 15. Ability of various oligonucleotides to induce skipping of exon 51 of dystrophin. Controls: WV-942 (Drisapersen, stereorandom) and untreated; Concentration: 10 uM; Duration: 4 days in differentiation medium; Cells: Del 48-50; treatment was gymnotic (without transfection reagent).

[0313] FIGS. 16A and 16B. Sequences and chemistry of various oligonucleotides, WV-2366 to WV-2370 (SEQ ID NOS 1263-1267, respectively). These have phosphorothioates in the Sp conformation in the wings and PO (phosphorodiesters) in the core.

[0314] FIG. 17. Ability of various oligonucleotides to induce skipping of exon 51 of dystrophin. Controls: WV-942 and untreated; Concentration: 10 uM; Duration: 4 days in differentiation medium; Cells: Del 48-50; treatment was gymnotic (without transfection reagent).

[0315] FIG. 18. Sequences and chemistry of various oligonucleotides, which are 20-mers or 25-mers, including WV-2313 to WV-2320 (SEQ ID NOS 1091-1098, respectively), and WV-2223 to WV-2230 (SEQ ID NOS 1005-1012, respectively).

[0316] FIG. 19. Location of the sequences of various oligonucleotides, which are 20-mers or 25-mers, including WV-2313 to WV-2320, and WV-2223 to WV-2230, relative to the human (H) and mouse (M) dystrophin sequences (SEQ ID NOS 2434 and 2433, respectively).

[0317] FIG. 20. Ability of various oligonucleotides to induce skipping of exon 51 of dystrophin. Controls: WV-942 and untreated; Concentration: 10 uM; Duration: 4 days in differentiation medium; Cells: Del 48-50; treatment was gymnotic (without transfection reagent).

[0318] FIG. 21. FIG. 21 shows the efficacy of stereopure oligonucleotides with 2′-F wings and either PO or Rp cores, in skipping exon 51 of human dystrophin, compared to WV-942 (Drisapersen). Treatment was 10 μM, gymnotic treatment.

[0319] FIG. 22. FIG. 22 shows the efficacy of stereopure oligonucleotides in skipping exon 51 of human dystrophin, compared to WV-942. Data for two different doses, 3 μM and 10 μM, are presented. On the bottom left are stereorandomers with different patterns of 2′-F and 2′-OMe modifications (SEQ ID NOS 429-436, respectively, in order of appearance). On the bottom right are stereopure oligonucleotides.

[0320] FIG. 23. FIG. 23 shows the efficacy of various oligonucleotides; shown are fold-changes compared to WV-942. Data for two different doses, 3 μM and 10 μM, are presented.

[0321] FIG. 24. FIG. 24 shows an example of a CA (carbonic anhydrase) inhibitor and an example linker, for attachment to a biologically active agent (as a non-limiting example, an oligonucleotide).

[0322] FIG. 25. FIG. 25 shows example skipping efficiency of oligonucleotides comprising lipid moieties in skipping exon 51 of human dystrophin. Data for different doses from 0.3 μM to 30 μM, are presented. Skipping efficiency generally increases with increased concentration. WV-3545 (WV-3473 conjugated to stearic acid by PO and C6 amino linker) and WV-3546 (WV-3473 conjugated to turbinaric acid by PO and C6 amino linker), both containing lipid moieties, demonstrated higher efficiency. Treatment was gymnotic (without transfection reagent). The experiment was done in triplicate, with average data shown.

[0323] FIG. 26. FIG. 26 shows that several example provided oligonucleotides do not have hTLR9 agonist activity under the tested conditions. The experiment was done in triplicate, with average data shown.

[0324] FIG. 27. FIG. 27 shows that example provided oligonucleotides comprising lipid moieties can effectively counteract hTLR9 agonistic activity (and to antagonize hTLR9). As demonstrated, conjugates of lipids (e.g., stearic acid (WV-3545) or turbinaric acid (WV-3546)) and oligonucleotides (e.g., WV-3473 (WV-3545 and WV-3546)) have significantly increased hTLR9 antagonistic activities. The concentration of agonistic oligonucleotide ODN2006 was held constant at 0.3 μM. Each oligonucleotide was tested at decreasing concentrations of: 5, 2.5, 1.25, 0.6, 0.3, 0.15 and 0.075 μM (from left to right). Treatment was gymnotic (without transfection reagent). The experiment was done in triplicate, with average data shown.

[0325] FIG. 28. FIG. 28 shows that example provided oligonucleotides comprising lipid moieties can effectively counteract hTLR9 agonistic activity (and to antagonize hTLR9). As demonstrated, conjugates of lipids (e.g., stearic acid (WV-3545) or turbinaric acid (WV-3546)) and oligonucleotides (e.g., WV-3473 (WV-3545 and WV-3546)) have significantly increased hTLR9 antagonistic activities. neg: negative control (buffer only). ODN2006c: an agonistic control in which the CpG sequence is replaced by GpC. PMO: Eteplirsen. The concentration of agonistic oligonucleotide ODN2006 was held constant at 0.3 μM. Each oligonucleotide was tested at decreasing concentrations of: 5, 2.5, 1.25, 0.6, 0.3, 0.15 and 0.075 μM (from left to right). Treatment was gymnotic (without transfection reagent). The experiment was done in triplicate, with average data shown.

[0326] FIG. 29. FIG. 29 shows that example provided oligonucleotides comprising various lipid moieties can significantly improve skipping efficiency compared to WV-942. Data for two doses, 3 μM (right column) and 10 μM (left column), are presented. Treatment was gymnotic (without transfection reagent). ND: not determined.

[0327] FIG. 30. FIG. 30 shows example skipping efficiency of example provided oligonucleotides in skipping exon 51 of human dystrophin. Lipid conjugation (WV-3534, WV-3553, WV-3546, and WV-4106) significantly improved efficiency. Skipping efficiency generally increases with increased concentration. Data for four different doses, 1 μM, 3 μM, 10 μM and 10 μM are presented. DMD del48-50 cells were used. Treatment was gymnotic (without transfection reagent). Figure discloses SEQ ID NOS 703, 721, 728, 722, and 750, respectively, in order of appearance.

[0328] FIGS. 31A to 31D. FIGS. 31A to 31D show the distribution of oligonucleotides in various muscle tissues: gastrocnemius (FIG. 31A); triceps (FIG. 31B); heart (FIG. 31C); and diaphragm (FIG. 31D). Oligonucleotides tested were: WV-3473 (SEQ ID NO: 703), WV-3545 (SEQ ID NO: 721) and WV-3546 (SEQ ID NO: 722), with WV-942 (SEQ ID NO: 206) as a control. Example oligonucleotides comprising lipid moieties have improved distributions to one or more muscle tissues, and/or may be readily cleared after a period of time compared to the control.

### DETAILED DESCRIPTION OF CERTAIN EMBODIMENTS

### 1. Definitions

[0329] As used herein, the following definitions shall apply unless otherwise indicated. For purposes of this disclosure, the chemical elements are identified in accordance with the Periodic Table of the Elements, CAS version, Handbook of Chemistry and Physics, 75th Ed. Additionally, general principles of organic chemistry are described in “Organic Chemistry”, Thomas Sorrell, University Science Books, Sausalito: 1999, and “March's Advanced Organic Chemistry”, 5th Ed., Ed.: Smith, M. B. and March, J., John Wiley & Sons, New York: 2001, the entire contents of which are hereby incorporated by reference.

[0330] Aliphatic: As used herein, “aliphatic” means a straight-chain (i.e., unbranched) or branched, substituted or unsubstituted hydrocarbon chain that is completely saturated or that contains one or more units of unsaturation, or a substituted or unsubstituted monocyclic, bicyclic, or polycyclic hydrocarbon ring that is completely saturated or that contains one or more units of unsaturation (but not aromatic), or combinations thereof. Unless otherwise specified, aliphatic groups contain 1-100 aliphatic carbon atoms. In some embodiments, aliphatic groups contain 1-20 aliphatic carbon atoms. In other embodiments, aliphatic groups contain 1-10 aliphatic carbon atoms. In other embodiments, aliphatic groups contain 1-9 aliphatic carbon atoms. In other embodiments, aliphatic groups contain 1-8 aliphatic carbon atoms. In other embodiments, aliphatic groups contain 1-7 aliphatic carbon atoms. In other embodiments, aliphatic groups contain 1-6 aliphatic carbon atoms. In still other embodiments, aliphatic groups contain 1-5 aliphatic carbon atoms, and in yet other embodiments, aliphatic groups contain 1, 2, 3, or 4 aliphatic carbon atoms. Suitable aliphatic groups include, but are not limited to, linear or branched, substituted or unsubstituted alkyl, alkenyl, alkynyl groups and hybrids thereof.

[0331] Alkenyl: As used herein, the term “alkenyl” refers to an alkyl group, as defined herein, having one or more double bonds.

[0332] Alkyl: As used herein, the term “alkyl” is given its ordinary meaning in the art and may include saturated aliphatic groups, including straight-chain alkyl groups, branched-chain alkyl groups, cycloalkyl (alicyclic) groups, alkyl substituted cycloalkyl groups, and cycloalkyl substituted alkyl groups. In some embodiments, alkyl has 1-100 carbon atoms. In certain embodiments, a straight chain or branched chain alkyl has about 1-20 carbon atoms in its backbone (e.g., C₁-C₂₀ for straight chain, C₂-C₂₀ for branched chain), and alternatively, about 1-10. In some embodiments, cycloalkyl rings have from about 3-10 carbon atoms in their ring structure where such rings are monocyclic, bicyclic, or polycyclic, and alternatively about 5, 6 or 7 carbons in the ring structure. In some embodiments, an alkyl group may be a lower alkyl group, wherein a lower alkyl group comprises 1-4 carbon atoms (e.g., C₁-C₄ for straight chain lower alkyls).

[0333] Alkynyl: As used herein, the term “alkynyl” refers to an alkyl group, as defined herein, having one or more triple bonds.

[0334] Animal: As used herein, the term “animal” refers to any member of the animal kingdom. In some embodiments, “animal” refers to humans, at any stage of development. In some embodiments, “animal” refers to non-human animals, at any stage of development. In certain embodiments, the non-human animal is a mammal (e.g., a rodent, a mouse, a rat, a rabbit, a monkey, a dog, a cat, a sheep, cattle, a primate, and/or a pig). In some embodiments, animals include, but are not limited to, mammals, birds, reptiles, amphibians, fish, and/or worms. In some embodiments, an animal may be a transgenic animal, a genetically-engineered animal, and/or a clone.

[0335] Antibody: The terms “antibody”, “immunoglobulin” and related terms, as used herein, refer to a protein (or fragment thereof, or biologically active fragment thereof) produced mainly by plasma cells that is used by the immune system to recognize, identify and/or neutralize specific antigens, epitopes, structures, pathogens, nucleic acids and other molecules. In some embodiments, an antibody recognizes a unique molecule of the harmful agent, called an antigen, via the variable region. In some embodiments, antibodies include, without limitation: monoclonal antibodies (including full length antibodies which have an immunoglobulin Fc region), antibody compositions with polyepitopic specificity, multispecific antibodies (e.g., bispecific antibodies, diabodies, and single-chain molecules), as well as antibody fragments. In some embodiments, an antibody is a monoclonal antibody, for example, an antibody obtained from a population of substantially homogeneous antibodies. In some embodiments, an antibody is a chimeric antibody, in which a portion of the heavy and/or light chain is identical with or homologous to corresponding sequences in antibodies derived from a particular species or belonging to a particular antibody class or subclass, while the remainder of the chain(s) is(are) identical with or homologous to corresponding sequences in antibodies derived from another species or belonging to another antibody class or subclass, as well as fragments of such antibodies, so long as they exhibit the desired biological activity. Chimeric antibodies of interest herein include, but are not limited to, “primatized” antibodies comprising variable domain antigen-binding sequences derived from a non-human primate (e.g., Old World Monkey, Ape etc.) and human constant region sequences. In some embodiments, an antibody fragment comprises a portion of an intact antibody, preferably the antigen binding and/or the variable region of the intact antibody. Non-limiting examples of antibody fragments include Fab, Fab′, F(ab′)₂ and Fv fragments; diabodies; linear antibodies; nanobodies; single-chain antibody molecules and multispecific antibodies formed from antibody fragments. In some embodiments, an antibody can be of any of five classes, IgA, IgD, IgE, IgG and IgM, and may be encoded by a mRNA, including the heavy chains designated alpha, delta, epsilon, gamma and mu, respectively. In some embodiments, any of the subclasses of antibodies may be encoded in part or in whole and include the following subclasses: IgG1, IgG2, IgG3, IgG4, IgA1 and IgA2. In various embodiments, an antibody can be utilized to treat conditions or diseases in many therapeutic areas such as, but not limited to, blood, cardiovascular, CNS, poisoning (including antivenoms), dermatology, endocrinology, gastrointestinal, medical imaging, musculoskeletal, oncology, immunology, respiratory, sensory and anti-infective. In some embodiments, an antibody is any of antibody variants, including, but not limited to, substitutional variants, conservative amino acid substitution, insertional variants, deletional variants and/or covalent derivatives. In one embodiment, the primary construct and/or mmRNA disclosed herein may encode an immunoglobulin Fc region. In another embodiment, the primary constructs and/or mmRNA may encode a variant immunoglobulin Fc region. In some embodiments, the primary constructs and/or mmRNA may encode an antibody having a variant immunoglobulin Fc region as described in U.S. Pat. No. 8,217,147.

[0336] Antisense oligonucleotide: The terms “antisense oligonucleotide” or “ASO”, as used herein, refer to an oligonucleotide or the like having, comprising, or consisting of a sequence of bases or the like which allow the oligonucleotide or the like to hybridize to a target molecule, such as another nucleic acid, modified nucleic acid or nucleic acid analog, e.g., by base-pairing, such as Watson-Crick base-pairing or non-Watson-Crick basepairing. In some embodiments, an antisense oligonucleotide is fully complementary or nearly fully complementary to the target molecule. In some embodiments, any olignucleotide of any type described herein or known in the art can be used as an antisense oligonucleotide. In various embodiments, an antisense oligonucleotide can perform or participate in any of various biological functions, including RNA interference, RNaseH-mediated cleavage, exon skipping, the prevention of exon skipping, the enhancement or blocking of an agent (e.g., a protein, RNA, protein-RNA complex, or any other molecule) from binding to another nucleic acid, or any other biological function performed by an antisense oligonucleotide, as described herein or known in the art. In some embodiments, an antisense oligonucleotide is an oligonucleotide which participates in RNaseH-mediated cleavage; for example, an antisense oligonucleotide hybridizes in a sequence-specific manner to a portion of a target mRNA, thus targeting the mRNA for cleavage my RNaseH. In some embodiments, an antisense oligonucleotide is able to differentiate between a wild-type and a mutant allele of a target. In some embodiments, an antisense oligonucleotide significantly participates in RNaseH-mediated cleavage of a mutant allele but participates in RNaseH-mediated cleavage of a wild-type allele to a much less degree (e.g., does not significantly participate in RNaseH-mediated cleavage of the wild-type allele of the target).

[0337] Approximately: As used herein, the terms “approximately” or “about” in reference to a number are generally taken to include numbers that fall within a range of 5%, 10%, 15%, or 20% in either direction (greater than or less than) of the number unless otherwise stated or otherwise evident from the context (except where such number would be less than 0% or exceed 100% of a possible value). In some embodiments, use of the term “about” in reference to dosages means±5 mg/kg/day.

[0338] Aptamer: The term “aptamer”, as used herein, refers to a nucleic acid molecule, e.g., a molecule comprising a RNA, DNA or nucleotide analog, that is capable of binding to a specific molecule with high affinity and specificity (Ellington et al., Nature 346, 818-22 (1990); and Tuerk et al., Science 249, 505-10 (1990)). In various embodiments, a ligand that binds to an aptamer includes, without limitation, small molecules, such as drugs, metabolites, intermediates, cofactors, transition state analogs, ions, metals, nucleic acids, and toxins. In some embodiments, an aptamer may also bind natural and synthetic polymers, including proteins, peptides, nucleic acids, polysaccharides, glycoproteins, hormones, receptors and cell surfaces such as cell walls and cell membranes. In some embodiments, an aptamer is between about 10 and about 300 nucleotides in length. In some embodiments, an aptamer is between about 30 and about 100 nucleotides in length. In some embodiments, an aptamer is made that bind to a wide variety of molecules. Each of these molecules can be used as a modulator of gene expression. In some embodiments, organic molecules, nucleotides, amino acids, polypeptides, target features on cell surfaces, ions, metals, salts, saccharides, have all been shown to be suitable for isolating aptamers that can specifically bind to the respective ligand. For instance, organic dyes such as Hoechst 33258 have reportedly been used as target ligands in vitro aptamer selections (Werstuck and Green, Science 282:296-298 (1998)). Other small organic molecules like dopamine, theophylline, sulforhodamine B, and cellobiose have also been reported as ligands in the isolation of aptamers. In some embodiments, an aptamers is been isolated for antibiotics such as kanamycin A, lividomycin, tobramycin, neomycin B, viomycin, chloramphenicol and streptomycin. For a review of aptamers that recognize small molecules, see Famulok, Science 9:324-9 (1999). In some embodiments, a ligand of the aptamer of an aptamer-regulated nucleic acid of the invention is a cell-permeable, small organic molecule. Small organic molecules which do not have a general inhibitory effect on translation can be used as ligands. The small molecule can also exhibit in vivo persistence sufficient for achieving a desired level of inhibition of translation. The molecules also can be screened to identify those that are bioavailable after, for example, oral administration. In some embodiments, the ligand is nontoxic. The ligand may optionally be a drug, including, for example, a steroid. In some embodiments, in some of the methods of controlling gene expression, a ligand can be pharmacologically inert. In some embodiments, a ligand is a polypeptide whose presence in the cell is indicative of a disease or pathological condition. In other embodiments, the ligand for an aptamer is an antibiotic, such as chloramphenicol. In an alternative embodiment, the ligand of the aptamer is an organic dye such as Hoeschst dye 33258. In still another embodiment, the ligand may be a metal ion. In a specific embodiment, the aptamer domain of an aptamer-regulated nucleic acid responds to binding to caffeine. In some embodiments, an aptamers is developed to bind particular ligands by employing known in vivo or in vitro (most typically, in vitro) selection techniques known as SELEX (Ellington et al., Nature 346, 818-22 (1990); and Tuerk et al., Science 249, 505-10 (1990)). Methods of making aptamers are also described in, for example, U.S. Pat. No. 5,582,981, PCT Publication No. WO 00/20040, U.S. Pat. No. 5,270,163, Lorsch and Szostak, Biochemistry, 33:973 (1994), Mannironi et al., Biochemistry 36:9726 (1997), Blind, Proc. Nat'l. Acad. Sci. USA 96:3606-3610 (1999), Huizenga and Szostak, Biochemistry, 34:656-665 (1995), PCT Publication Nos. WO 99/54506, WO 99/27133, WO 97/42317 and U.S. Pat. No. 5,756,291. In some embodiments, aptamers include those that target any of: VEGF, tissue factor pathway inhibitor (TFPI), Factor IXa, complement component 5 (C₅), HIV Tat protein, and HIV Rev protein.

[0339] Aryl: The term “aryl”, as used herein, used alone or as part of a larger moiety as in “aralkyl,” “aralkoxy,” or “aryloxyalkyl,” refers to monocyclic, bicyclic or polycyclic ring systems having a total of five to thirty ring members, wherein at least one ring in the system is aromatic. In some embodiments, an aryl group is a monocyclic, bicyclic or polycyclic ring system having a total of five to fourteen ring members, wherein at least one ring in the system is aromatic, and wherein each ring in the system contains 3 to 7 ring members. In some embodiments, an aryl group is a biaryl group. The term “aryl” may be used interchangeably with the term “aryl ring.” In certain embodiments of the present disclosure, “aryl” refers to an aromatic ring system which includes, but not limited to, phenyl, biphenyl, naphthyl, binaphthyl, anthracyl and the like, which may bear one or more substituents. Also included within the scope of the term “aryl,” as it is used herein, is a group in which an aromatic ring is fused to one or more non-aromatic rings, such as indanyl, phthalimidyl, naphthimidyl, phenanthridinyl, or tetrahydronaphthyl, and the like. In some embodiments, an aryl group has a radical or point of attachment on an aromatic ring.

[0340] Biologically active agent: The term “biologically active agent”, as used herein, refers to any agent (including, but not limited to, an active compound) which has, mediates, or participates in a biological activity. In various embodiments, a biologically active agent can be organic or in-organic. Non-limiting examples of biologically active agents include: a small molecule, a peptide, a protein, a component of a CRISPR-Cas system, a carbohydrate, a therapeutic agent, a chemotherapeutic agent, a vaccine, a nucleic acid, and a lipid. In some embodiments, a biologically active agent includes an inorganic or organic molecule including a small molecule, peptide (e.g. cell penetrating peptides), carbohydrate (including monosaccharides, oligosaccharides, and polysaccharides), protein (including nucleoprotein, mucoprotein, lipoprotein, synthetic polypeptide, or a small molecule linked to a protein, glycoprotein), steroid, nucleic acid, lipid, hormone, or combination thereof, that causes a biological effect when administered in vivo to an animal, including but not limited to birds and mammals, including humans. In some embodiments, the biologically active agent is charged. In some embodiments, the biologically active agent is positively charged. In some embodiments, the biologically active agent is negatively charged. In some embodiments, a biologically active agent is selected from: 16-alpha fluoroestradiol, 16-alpha-gitoxin, 16-epiestriol, 17-alpha dihydroequilenin, 17-alpha estradiol, 17-beta estradiol, 17-hydroxy progesterone, 1-alpha-hydroxyvitamin D2, 1-dodecpyrrolidinone, 20-epi-1,25 dihydroxyvitamin D3, 22-oxacalcitriol, 2CW, 2′-nor-cGMP, 3-isobutyl GABA, 5-ethynyluracil, 6-FUDCA, 7-methoxytacrine, Abamectin, abanoquil, abecarnil, abiraterone, Ablukast, Ablukast Sodium, Acadesine, acamprosate, Acarbose, Acebutolol, Acecamide Hydrochloride, Aceclidine, aceclofenae, Acedapsone, Aceglutamide Aluminum, Acemannan, Acetaminophen, Acetazolamide, Acetohexamide, Acetohydroxamic Acid, acetomepregenol, Acetophenazine Maleate, Acetosulfone Sodium, Acetylcholine Chloride, Acetylcysteine, acetyl-L-carnitine, acetylmethadol, Acifran, acipimox, acitemate, Acitretin, Acivicin, Aclarubicin, aclatonium, Acodazole Hydrochloride, aconiazide, Acrisorcin, Acrivastine, Acronine, Actisomide, Actodigin, Acyclovir, acylfulvene, adafenoxate, adapalene, Adapalene, adatanserin, Adatanserin Hydrochloride, adecypenol, adecypenol, Adefovir, adelmidrol, ademetionine, Adenosine, Adinazolam, Adipheinine Hydrochloride, adiposin, Adozelesin, adrafinil, Adrenalone, airbutamine, alacepril, Alamecin, Alanine, Alaproclate, alaptide, Albendazole, albolabrin, Albuterol, Albutoin, Alclofenae, Alclometasone Dipropionate, Alcloxa, aldecalmycin, Aldesleukin, Aldioxa, Alendronate Sodium, alendronic acid, alentemol, Alentemol Hydrobromide, Aletamine Hydrochloride, Aleuronium Chloride, Alexidine, alfacalcidol, Alfentanil Hydrochloride, alfuzosin, Algestone Acetonide, alglucerase, Aliflurane, alinastine, Alipamide, Allantoin, Allobarbital, Allopurinol, ALL-TK antagonists, Alonimid, alosetron, Alosetron Hydrochloride, Alovudine, Alpertine, Alpha Amylase, alpha idosone, Alpidem, Alprazolam, Alprenolol Hydrochloride, Alprenoxime Hydrochloride, Alprostadil, Alrestatin Sodium, Altanserin Tartrate, Alteplase, Althiazide, Altretamine, altromycin B, Alverinc Citrate, Alvircept Sudotox, Amadinone Acetate, Amantadine Hydrochloride, ambamustine, Ambomycin, Ambruticin, Ambuphylline, Ambuside, Amcinafal, Amcinonide, Amdinocillin, Amdinocillin Pivoxil, Amedalin Hydrochloride, amelometasone, Ameltolide, Amesergide, Ametantrone Acetate, amezinium metilsulfate, amfebutamone, Amfenac Sodium, Amflutizole, Amicycline, Amidephrine Mesylate, amidox, Amifloxacin, amifostine, Amikacin, Amiloride Hydrochloride, Aminacrine Hydrochloride, Aminobenzoate Potassium, Aminobenzoate Sodium, Aminocaproic Acid, Aminoglutethimide, Aminohippurate Sodium, aminolevulinic acid, Aminophylline, A minorex, Aminosalicylate sodium, Aminosalicylic acid, Amiodarone, Amiprilose Hydrochloride, Amiquinsin Hydrochloride, amisulpride, Amitraz, Amitriptyline Hydrochloride, Amlexanox, amlodipine, Amobarbital Sodium, Amodiaquine, Amodiaquine Hydrochloride, Amorolfine, Amoxapine, Amoxicillin, Amphecloral, Amphetamine Sulfate, Amphomycin, Amphotericin B, Ampicillin, ampiroxicam, Ampyzine Sulfate, Amquinate, Amrinone, aminone, amrubicin, Amsacrine, amylin, amythiamicin, Anagestone Acetate, anagrelide, Anakinra, ananain, anaritide, Anaritide Acetate, Anastrozole, Anazolene Sodium, Ancrod, andrographolide, Androstenedione, angiogenesis inhibitors, Angiotensin Amide, Anidoxime, Anileridine, Anilopam Hydrochloride, Aniracetam, Anirolac, Anisotropine Methylbromide, Anistreplase, Anitrazafen, anordrin, antagonist D, antagonist G, antarelix, Antazoline Phosphate, Anthelmycin, Anthralin, Anthramycin, antiandrogen, Acedapsone, Felbamate, antiestrogen, antineoplaston, Antipyrine, antisense oligonucleotides, apadoline, apafant, Apalcillin Sodium, apaxifylline, Apazone, aphidicolin glycinate, Apixifylline, Apomorphine Hydrochloride, apraclonidine, Apraclonidine Hydrochloride, Apramycin, Aprindine, Aprindine Hydrochloride, aprosulate sodium, Aprotinin, Aptazapine Maleate, aptiganel, apurinic acid, apurinic acid, aranidipine, Aranotin, Arbaprostil, arbekicin, arbidol, Arbutamine Hydrochloride, Arclofenin, Ardeparin Sodium, argatroban, Arginine, Argipressin Tannate, Arildone, aripiprazol, arotinolol, Arpinocid, Arteflene, Artilide Fumarate, asimadoline, aspalatone, Asparaginase, Aspartic Acid, Aspartocin, asperfuran, Aspirin, aspoxicillin, Asprelin, Astemizole, Astromicin Sulfate, asulacrine, atamestane, Atenolol, atevirdine, Atipamezole, Atiprosin Maleate, Atolide, Atorvastatin Calcium, Atosiban, Atovaquone, atpenin B, Atracurium Besylate, atrimustine, atrinositol, Atropine, Auranofin, aureobasidin A, Aurothioglucose, Avilamycin, Avoparcin, Avridine, Axid, axinastatin 1, axinastatin 2, axinastatin 3, Azabon, Azacitidinie, Azaclorzine Hydrochloride, Azaconazole, azadirachtine, Azalanstat Dihydrochloride, Azaloxan Fumarate, Azanator Maleate, Azanidazole, Azaperone, Azaribine, Azaserine, azasetron, Azatadine Maleate, Azathioprine, Azathioprine Sodium, azatoxin, azatyrosine, azelaic acid, azelastine, azelnidipine, Azepindole, Azetepa, azimilide, Azithromycin, Azlocillin, Azolimine, Azosemide, Azotomycin, Aztreonam, Azumolene Sodium, Bacampicillin Hydrochloride, baccatin III, Bacitracin, Baclofen, bacoside A, bacoside B, bactobolamine, balanol, balazipone, balhimycin, balofloxacin, balsalazide, Bambermycins, bambuterol, Bamethan Sulfate, Bamifylline Hydrochloride, Bamidazole, baohuoside 1, Barmastine, barnidipine, Basifungin, Batanopride Hydrochloride, batebulast, Batelapine Maleate, Batimastat, beauvericin, Becanthone Hydrochloride, becaplermin, becliconazole, Beclomethasone Dipropionate, befloxatone, Beinserazide, Belfosdil, Belladonna, Beloxamide, Bemesetron, Bemitradine, Bemoradan, Benapryzine Hydrochloride, Benazepril Hydrochloride, Benazeprilat, Bendacalol Mesylate, Bendazac, Bendroflumethiazide, benflumetol, benidipine, Benorterone, Benoxaprofen, Benoxaprofen, Benoxinate Hydrochloride, Benperidol, Bentazepam, Bentiromide, Benurestat, Benzbromarone, Benzethonium Chloride, Benzetimide Hydrochloride, Benzilonium Bromide, Benzindopyrine Hydrochloride, benzisoxazole, Benzocaine, benzochlorins, Benzoctamine Hydrochloride, Benzodepa, benzoidazoxan, Benzonatate, Benzoyl Peroxide, Benzoylpas Calcium, benzoylstaurosporine, Benzquinamide, Benzthiazide, benztropine, Benztropine Mesylate, Benzydamine Hydrochloride, Benzylpenicilloyl Polylysine, bepridil, Bepridil Hydrochloride, Beractant, Beraprost, Berefrine, berlafenone, bertosamil, Berythromycin, besipirdine, beta-alethine, betaclamycin B, Betamethasone, betamipron, betaxolol, Betaxolol Hydrochloride, Bethanechol Chloride, Bethanidine Sulfate, betulinic acid, bevantolol, Bevantolol Hydrochloride, Bezafibrate, bFGF inhibitor, Bialamicol Hydrochloride, Biapenem, Bicalutamide, Bicifadine Hydrochloride, Biclodil Hydrochloride, Bidisomide, bifemelane, Bifonazole, bimakalim, bimithil, Bindarit, Biniramycin, binospirone, bioxalomycin alpha2, Bipenamol Hydrochloride, Biperiden, Biphenamine Hydrochloride, biriperone, bisantrene, bisaramil, bisaziridinylspermine, bis-benzimidazole A, bis-benzimidazole B, bisnafide, Bisobrin Lactate, Bisoprolol, Bispyrithione Magsulfex, bistramide D, bistramide K, bistratene A, Bithionolate Sodium, Bitolterol Mesylate, Bivalirudin, Bizelesin, Bleomycin Sulfate, Bolandiol Dipropionate, Bolasterone, Boldenone Undecylenate, boldine, Bolenol, Bolmantalate, bopindolol, Bosentan, Boxidine, brefeldin, breflate, Brequinar Sodium, Bretazenil, Bretylium Tosylate, Brifentanil Hydrochloride, brimonidine, Brinolase, Brocresine, Brocrinat, Brofoxine, Bromadoline Maleate, Bromazepam, Bromchlorenone, Bromelains, bromfenac, Brominidione, Bromocriptine, Bromodiphenhydramine Hydrochloride, Bromoxamide, Bromperidol, Bromperidol Decanoate, Brompheniramine Maleate, Broperamole, Bropirimine, Brotizolam, Bucamide Maleate, bucindolol, Buclizine Hydrochloride, Bucromarone, Budesonide, budipine, budotitane, Buformin, Bumetamide, Bunaprolast, bunazosin, Bunolol Hydrochloride, Bupicomide, Bupivacaine Hydrochloride, Buprenorphine Hydrochloride, Bupropion Hydrochloride, Buramate, Buserelin Acetate, Buspirone Hydrochloride, Busulfan, Butabarbital, Butacetin, Butaclamol Hydrochloride, Butalbital, Butamben, Butamirate Citrate, Butaperazine, Butaprost, Butedronate Tetrasodium, butenafine, Buterizine, buthionine sulfoximine, Butikacin, Butilfenin, Butirosin Sulfate, Butixirate, butixocort propionate, Butoconazole Nitrate, Butonate, Butopamine, Butoprozine Hydrochloride, Butorphanol, Butoxamine Hydrochloride, Butriptyline Hydrochloride, Cactinomycin, Cadexomer Iodine, Caffeine, calanolide A, Calcifediol, Calcipotriene, calcipotriol, Calcitonin, Calcitriol, Calcium Undecylenate, calphostin C, Calusterone, Cambendazole, camonagrel, camptothecin derivatives, canarypox IL-2, candesartan, Candicidin, candoxatril, candoxatrilat, Caniglibose, Canrenoate Potassium, Canrenone, capecitabine, Capobenate Sodium, Capobenic Acid, Capreomycin Sulfate, capromab, capsaicin, Captopril, Capuride, Caracemide, Carbachol, Carbadox, Carbamazepine, Carbamide Peroxide, Carbantel Lauryl Sulfate, Carbaspirin Calcium, Carbazeran, carbazomycin C, Carbenicillin Potassium, Carbenoxolone Sodium, Carbetimer, carbetocin, Carbidopa, Carbidopa-Levodopa, Carbinoxamine Maleate, Carbiphene Hydrochloride, Carbocloral, Carbocysteine, Carbol-Fuchsin, Carboplatin, Carboprost, carbovir, carboxamide-amino-triazole, carboxyamidotriazole, carboxymethylated beta-1,3-glucan, Carbuterol Hydrochloride, CaRest M3, Carfentanil Citrate, Carisoprodol, Carmantadine, Carmustine, CARN 700, Camidazole, Caroxazone, carperitide, Carphenazine Maleate, Carprofen, Carsatrin Succinate, Cartazolate, carteolol, Carteolol Hydrochloride, cartilage derived inhibitor, Carubicin Hydrochloride, Carumonam Sodium, carvedilol, carvotroline, Carvotroline Hydrochloride, carzelesin, casein kinase inhibitors (ICOS), castanospermine, caurumonam, cebaracetam, cecropin B, Cedefingol, Cefaclor, Cefadroxil, Cefamandole, Cefaparole, Cefatrizine, Cefazaflur Sodium, Cefazolin, Cefbuperazone, cefcapene pivoxil, cefdaloxime pentexil tosilate, Cefdinir, cefditoren pivoxil, Cefepime, cefetamet, Cefetecol, cefixime, cefluprenam, Cefinenoxime Hydrochloride, Cefinetazole, cefminlox, cefodizime, Cefonicid Sodium, Cefoperazone Sodium, Ceforamide, cefoselis, Cefotaxime Sodium, Cefotetan, cefotiam, Cefoxitin, cefozopran, cefpimizole, Cefpiramide, cefpirome, cefpodoxime proxetil, cefprozil, Cefroxadine, cefsulodin, Ceftazidime, cefteram, ceftibuten, Ceftizoxime Sodium, ceftriaxone, Cefuroxime, celastrol, celikalim, celiprolol, cepacidiine A, Cephacetrile Sodium, Cephalexin, Cephaloglycin, Cephaloridine, Cephalothin Sodium, Cephapirin Sodium, Cephradine, cericlamine, cerivastatin, Ceronapril, certoparin sodium, Ceruletide, Cetaben Sodium, Cetalkonium Chloride, Cetamolol Hydrochloride, cetiedil, cetirizine, Cetophenicol, Cetraxate Hydrochloride, cetrorelix, Cetylpyridinium Chloride, Chenodiol, Chlophedianol Hydrochloride, Chloral Betaine, Chlorambucil, Chloramphenicol, Chlordantoin, Chlordiazepoxide, Chlorhexidine Gluconate, chlorins, Chlormadinone Acetate, chloroorienticin A, Chloroprocaine Hydrochloride, Chloropropamide, Chloroquine, chloroquinoxaline sulfonamide, Chlorothiazide, Chlorotrianisene, Chloroxine, Chloroxylenol, Chlorphenesin Carbamate, chlorpheniramine Maleate, Chlorpromazine, Chlorpropamide, Chlorprothixene, Chlortetracycline Bisulfate, Chlorthalidone, Chlorzoxazone, Cholestyramine Resin, Chromonar Hydrochloride, cibenzoline, cicaprost, Ciclafrine Hydrochloride, Ciclazindol, ciclesonide, cicletanine, Ciclopirox, Cicloprofen, cicloprolol, Cidofovir, Cidoxepin Hydrochloride, Cifenline, Ciglitazone, Ciladopa Hydrochloride, cilansetron, Cilastatin Sodium, Cilazapril, cilnidipine, Cilobamine Mesylate, cilobradine, Cilofungin, cilostazol, Cimaterol, Cimetidine, cimetropium bromide, Cinalukast, Cinanserin Hydrochloride, Cinepazet Maleate, Cinflumide, Cingestol, cinitapride, Cinnamedrine, Cinnarizine, cinolazepam, Cinoxacin, Cinperene, Cinromide, Cintazone, Cintriamide, Cioteronel, Cipamfylline, Ciprefadol Succinate, Ciprocinonide, Ciprofibrate, Ciprofloxacin, ciprostene, Ciramadol, Cirolemycin, cisapride, cisatracurium besilate, Cisconazole, Cisplatin, cis-porphyrin, cistinexine, citalopram, Citenamide, citicoline, citreamicin alpha, cladribine, Clamoxyquin Hydrochloride, Clarithromycin, clausenamide, Clavulanate Potassium, Clazolam, Clazolimine, clebopride, Clemastine, Clentiazem Maleate, Clidinium Bromide, clinafloxacin, Clindamycin, Clioquinol, Clioxamide, Cliprofen, clobazam, Clobetasol Propionate, Clobetasone Butyrate, Clocortolone Acetate, Clodanolene, Clodazon Hydrochloride, clodronic acid, Clofazimine, Clofibrate, Clofilium Phosphate, Clogestone Acetate, Clomacran Phosphate, Clomegestone Acetate, Clometherone, clomethiazole, clomifene analogues, Clominorex, Clomiphene, Clomipramine Hydrochloride, Clonazepam, Clonidine, Clonitrate, Clonixeril, Clonixin, Clopamide, Clopenthixol, Cloperidone Hydrochloride, clopidogrel, Clopimozide, Clopipazan Mesylate, Clopirac, Cloprednol, Cloprostenol Sodium, Clorazepate Dipotassium, Clorethate, Clorexolone, Cloroperone Hydrochloride, Clorprenaline Hydrochloride, Clorsulon, Clortermine Hydrochloride, Closantel, Closiramine Aceturate, Clothiapine, Clothixamide Maleate Cloticasone Propionate, Clotrimazole, Cloxacillin Benzathine, Cloxyquin, Clozapine, Cocaine, Coccidioidin, Codeine, Codoxime, Colchicine, colestimide, Colestipol Hydrochloride, Colestolone, Colforsin, Colfosceril Palmitate, Colistimethate Sodium, Colistin Sulfate, collismycin A, collismycin B, Colterol Mesylate, combretastatin A4, combretastatin analogue, complestatin, conagenin, Conorphone Hydrochloride, contignasterol, contortrostatin, Cormethasone Acetate, Corticorelin Ovine Triflutate, Corticotropin, Cortisone Acetate, Cortivazol, Cortodoxone, cosalane, costatolide, Cosyntropin, cotinine, Coumadin, Coumermycin, crambescidin 816, Crilvastatin, crisnatol, Cromitrile Sodium, Cromolyn Sodium, Crotamiton, cryptophycin 8, cucumariosid, Cuprimyxin, curacin A, curdlan sulfate, curiosin, Cyclacillin, Cyclazocine, cyclazosin, cyclic HPMPC, Cyclindole, Cycliramine Maleate, Cyclizine, Cyclobendazole, cyclobenzaprine, cyclobut A, cyclobut G, cyclocapron, Cycloguanil Pamoate, Cycloheximide, cyclopentanthraquinones, Cyclopenthiazide, Cyclopentolate Hydrochloride, Cyclophenazine Hydrochloride, Cyclophosphamide, cycloplatam, Cyclopropane, Cycloserine, cyclosin, Cyclosporine, cyclothialidine, Cyclothiazide, cyclothiazomycin, Cyheptamide, cypemycin, Cypenamine Hydrochloride, Cyprazepam, Cyproheptadine Hydrochloride, Cyprolidol Hydrochloride, cyproterone, Cyproximide, Cysteamine, Cysteine Hydrochloride, Cystine, Cytarabine, Cytarabine Hydrochloride, cytarabine Ocfosfate, cytochalasin B, cytolytic factor, cytostatin, Dacarbazine, dacliximab, dactimicin, Dactinomycin, daidzein, Daledalin Tosylate, dalfopristin, Dalteparin Sodium, Daltroban, Dalvastatin, danaparoid, Danazol, Dantrolene, daphlnodorin A, dapiprazole, dapitant, Dapoxetine Hydrochloride, Dapsone, Daptomycin, Darglitazone Sodium, darifenacin, darlucin A, Darodipine, darsidomine, Daunorubicin Hydrochloride, Dazadrol Maleate, Dazepinil Hydrochloride, Dazmegrel, Dazopride Fumarate, Dazoxiben Hydrochloride, Debrisoquin Sulfate, Decitabine, deferiprone, deflazacort, Dehydrocholic Acid, dehydrodidemnin B, Dehydroepiandrosterone, delapril, Delapril Hydrochloride, Delavirdine Mesylate, delequamine, delfaprazine, Delmadinone Acetate, delmopinol, delphinidin, Demecarium Bromide, Demeclocycline, Demecycline, Demoxepam, Denofungin, deoxypyridinoline, Depakote, deprodone, Deprostil, depsidomycin, deramciclane, dermatan sulfate, Desciclovir, Descinolone Acetonide, Desflurane, Desipramine Hydrochloride, desirudin, Deslanoside, deslorelin, desmopressin, desogestrel, Desonide, Desoximetasone, desoxoamiodarone, Desoxycorticosterone Acetate, detajmium bitartrate, Deterenol Hydrochloride, Detirelix Acetate, Devazepide, Dexamethasone, Dexamisole, Dexbrompheniramine Maleate, Dexchlorpheniramine Maleate, Dexclamol Hydrochloride, Dexetimide, Dexfenfluramine Hydrochloride, dexifosfamide, Deximafen, Dexivacaine, dexketoprofen, dexloxiglumide, Dexmedetomidine, Dexormaplatin, Dexoxadrol Hydrochloride, Dexpanthenol, Dexpemedolac, Dexpropranolol Hydrochloride, Dexrazoxane, dexsotalol, dextrin 2-sulphate, Dextroamphetamine, Dextromethorphan, Dextrorphan Hydrochloride, Dextrothyroxine Sodium, dexverapamil, Dezaguanine, dezinamide, dezocine, Diacetolol Hydrochloride, Diamocaine Cyclamate, Diapamide, Diatrizoate Meglumine, Diatrizoic Acid, Diaveridine, Diazepam, Diaziquone, Diazoxide, Dibenzepin Hydrochloride, Dibenzothiophene, Dibucaine, Dichliorvos, Dichloralphenazone, Dichlorphenamide, Dicirenone, Diclofenac Sodium, Dicloxacillin, dicranin, Dicumarol, Dicyclomine Hydrochloride, Didanosine, didemnin B, didox, Dienestrol, dienogest, Diethylcarbamazine Citrate, diethylhomospermine, diethylnorspermine, Diethylpropion Hydrochloride, Diethylstilbestrol, Difenoximide Hydrochloride, Difenoxin, Diflorasone Diacetate, Difloxacin Hydrochloride, Difluanine Hydrochloride, Diflucortolone, Diflumidone Sodium, Diflunisal, Difluprednate, Diftalone, Digitalis, Digitoxin, Digoxin, Dihexyverine Hydrochloride, dihydrexidine, dihydro-5-azacytidine, Dihydrocodeine Bitartrate, Dihydroergotamine Mesylate, Dihydroestosterone, Dihydrostreptomycin Sulfate, Dihydrotachysterol, dihydrotaxol, 9-, Dilantin, Dilevalol Hydrochloride, Diltiazem Hydrochloride, Dimefadane, Dimefline Hydrochloride, Dimenhydrinate, Dimercaprol, Dimethadione, Dimethindene Maleate, Dimethisterone, dimethyl prostaglandin A1, Dimethyl Sulfoxide, dimethylhomospermine, dimiracetam, Dimoxamine Hydrochloride, Dinoprost, Dinoprostone, Dioxadrol Hydrochloride, dioxamycin, Diphenhydramine Citrate, Diphenidol, Diphenoxylate Hydrochloride, diphenyl spiromustine, Dipivefin Hydrochloride, Dipivefrin, dipliencyprone, diprafenone, dipropylnorspermine, Dipyridamole, Dipyrithione, Dipyrone, dirithromycin, discodermolide, Disobutamide, Disofenin, Disopyramide, Disoxaril, disulfuram, Ditekiren, Divalproex Sodium, Dizocilpine Maleate, Dobutamine, docarpamine, Docebenone, Docetaxel, Doconazole, docosanol, dofetilide, dolasetron, Ebastine, ebiratide, ebrotidine, ebselen, ecabapide, ecabet, ecadotril, ecdisteron, echicetin, echistatin, Echothiophate Iodide, Eclanamine Maleate, Eclazolast, ecomustine, Econazole, ecteinascidin 722, edaravone, Edatrexate, edelfosine, Edifolone Acetate, edobacomab, Edoxudine, edrecolomab, Edrophonium Chloride, edroxyprogesteone Acetate, efegatran, eflornithine, efonidipine, egualcen, Elantrine, eleatonin, elemene, eletriptan, elgodipine, eliprodil, Elsamitrucin, eltenae, Elucaine, emalkalim, emedastine, Emetine Hydrochloride, emiglitate, Emilium Tosylate, emitefur, emoctakin, Enadoline Hydrochloride, enalapril, Enalaprilat, Enalkiren, enazadrem, Encyprate, Endralazine Mesylate, Endrysone, Enflurane, englitazone, Enilconazole, Enisoprost, Enlimomab, Enloplatin, Enofelast, Enolicam Sodium, Enoxacin, enoxacin, enoxaparin sodium, Enoxaparin Sodium, Enoximone, Enpiroline Phosphate, Enprofylline, Enpromate, entacapone, enterostatin, Enviradene, Enviroxime, Ephedrine, Epicillin, Epimestrol, Epinephrine, Epinephryl Borate, Epipropidine, Epirizole, epirubicin, Epitetracycline Hydrochloride, Epithiazide, Epoetin Alfa, Epoetin Beta, Epoprostenol, Epoprostenol Sodium, epoxymexrenone, epristeride, Eprosartan, eptastigmine, equilenin, Equilin, Erbulozole, erdosteine, Ergoloid Mesylates, Ergonovine Maleate, Ergotamine Tartrate, ersentilide, Ersofermin, erythritol, Erythrityl Tetranitrate, Erythromycin, Esmolol Hydrochloride, Esorubicin Hydrochloride, Esproquin Hydrochloride, Estazolam, Estradiol, Estramustine, estramustine analogue, Estrazinol Hydrobromide, Estriol, Estrofurate, estrogen agonists, estrogen antagonists, Estrogens, Conjugated, Estrogens, Esterified, Estrone, Estropipate, esuprone, Etafedrine Hydrochloride, Etanidazole, etanterol, Etarotene, Etazolate Hydrochloride, Eterobarb, ethacizin, Ethacrynate Sodium, Ethacrynic Acid, Ethambutol Hydrochloride, Ethamivan, Ethanolamine Oleate, Ethehlorvynol, Ether, Ethinyl estradiol, Ethiodized Oil, Ethionamide, Ethonam Nitrate, Ethopropazine Hydrochloride, Ethosuximide, Ethotoin, Ethoxazene Hydrochloride, Ethybenztropine, Ethyl Chloride, Ethyl Dibunate, Ethylestrenol, Ethyndiol, Ethynerone, Ethynodiol Diacetate, Etibendazole, Etidocaine, Etidronate Disodium, Etidronic Acid, Etifenin, Etintidine Hydrochloride, etizolam, Etodolac, Etofenamate, Etoformin Hydrochloride, Etomidate, Etonogestrel, Etoperidone Hydrochloride, Etoposide, Etoprine, Etoxadrol Hydrochloride, Etozolin, etrabamine, Etretinate, Etryptamine Acetate, Eucatropine Hydrochloride, Eugenol, Euprocin Hydrochloride, eveminomicin, Exametazime, examorelin, Exaprolol Hydrochloride, exemestane, fadrozole, faeriefungin, Famciclovir, Famotidine, Fampridine, fantofarone, Fantridone Hydrochloride, faropenem, fasidotril, fasudil, fazarabine, fedotozine, felbamate, Felbinac, Felodipine, Felypressin, Fenalamide, Fenamole, Fenbendazole, Fenbufen, Fencibutirol, Fenclofenac, Fenclonine, Fenclorac, Fendosal, Fenestrel, Fenethylline Hydrochloride, Fenfluramine Hydrochloride, Fengabine, Fenimide, Fenisorex, Fenmetozole Hydrochloride, Fenmetramide, Fenobam, Fenoctimine Sulfate, fenofibrate, fenoldopam, Fenoprofen, Fenoterol, Fenpipalone, Fenprinast Hydrochloride, Fenprostalene, Fenquizone, fenretinide, fenspiride, Fentanyl Citrate, Fentiazac, Fenticlor, fenticonazole, Fenyripol Hydrochloride, fepradinol, ferpifosate sodium, ferristene, ferrixan, Ferrous Sulfate, Dried, Ferumoxides, ferumoxsil, Fetoxylate Hydrochloride, fexofenadine, Fezolamine Fumarate, Fiacitabine, Fialuridine, Fibrinogen I 125, filgrastim, Filipin, finasteride, Flavodilol Maleate, flavopiridol, Flavoxate Hydrochloride, Flazalone, flecamide, flerobuterol, Fleroxacin, flesinoxan, Flestolol Sulfate, Fletazepam, flezelastine, flobufen, Floctafenine, flomoxef, Flordipine, florfenicol, florifenine, flosatidil, Flosequinan, Floxacillin, Floxuridine, fluasterone, Fluazacort, Flubanilate Hydrochloride, Flubendazole, Flucindole, Flucloronide, Fluconazole, Flucytosine, Fludalanine, Fludarabine Phosphate, Fludazonium Chloride, Fludeoxyglucose F 18, Fludorex, Fludrocortisone Acetate, Flufenamic Acid, Flufenisal, Flumazenil, flumecinol, Flumequine, Flumeridone, Flumethasone, Flumetramide, Flumezapine, Fluminorex, Flumizole, Flumoxonide, flunarizine, Flunidazole, Flunisolide, Flunitrazepam, Flunixin, fluocalcitriol, Fluocinolone Acetonide, Fluocinonide, Fluocortin Butyl, Fluocortolone, Fluorescein, fluorodaunorunicin hydrochloride, Fluorodopa F 18, Fluorometholone, Fluorouracil, Fluotracen Hydrochloride, Fluoxetine, Fluoxymesterone, fluparoxan, Fluperamide, Fluperolone Acetate, Fluphenazine Decanoate, flupirtine, Fluprednisolone, Fluproquazone, Fluprostenol Sodium, Fluquazone, Fluradoline Hydrochloride, Flurandrenolide, Flurazepam Hydrochloride, Flurbiprofen, Fluretofen, flurithromycin, Fluorocitabine, Fluorofamide, Fluorogestone Acetate, Fluorothyl, Fluoroxene, Fluspiperone, Fluspirilene, Fluticasone Propionate, flutrimazole, Flutroline, fluvastatin, Fluvastatin Sodium, fluvoxamine, Fluzinamide, Folic Acid, Follicle regulatory protein, Folliculostatin, Fomepizole, Fonazine Mesylate, forasartan, forfenimex, forfenirmex, formestane, Formocortal, formoterol, Fosarilate, Fosazepam, Foscarnet Sodium, fosfomycin, Fosfonet Sodium, fosinopril, Fosinoprilat, fosphenyloin, Fosquidone, Fostedil, fostriecin, fotemustine, Fuchsin, Basic, Fumoxicillin, Fungimycin, Furaprofen, Furazolidone, Furazolium Chloride, Furegrelate Sodium, Furobufen, Furodazole, Furosemide, Fusidate Sodium, Fusidic Acid, gabapentin, Gadobenate Dimeglumine, gadobenic acid, gadobutrol, Gadodiamide, gadolinium texaphyrin, Gadopentetate Dimegiumine, gadoteric acid, Gadoteridol, Gadoversetamide, galantamine, galdansetron, Galdansetron Hydrochloride, Gallamine Triethiodide, gallium nitrate, gallopamil, galocitabine, Gamfexine, gamolenic acid, Ganciclovir, ganirelix, gelatinase inhibitors, Gemcadiol, Gemcitabine, Gemeprost, Gemfibrozil, Gentamicin Sulfate, Gentian Violet, gepirone, Gestaclone, Gestodene, Gestonorone Caproate, Gestrinone, Gevotroline Hydrochloride, girisopam, glaspimod, glaucocalyxin A, Glemanserin, Gliamilide, Glibornuride, Glicetanile Sodium, Gliflumide, Glimepiride, Glipizide, Gloximonam, Glucagon, glutapyrone, glutathione inhibitors, Glutethimide, Glyburide, glycopine, glycopril, Glycopyrrolate, Glyhexamide, Glymidine Sodium, Glyoctamide, Glyparamide, Gold Au 198, Gonadoctrinins, Gonadorelin, Gonadotropins, Goserelin, Gramicidin, Granisetron, grepafloxacin, Griseofulvin, Guaiapate, Guaithylline, Guanabenz, Guanabenz Acetate, Guanadrel Sulfate, Guancydine, Guanethidine Monosulfate, Guanfacine Hydrochloride, Guanisoquin Sulfate, Guanoclor Sulfate, Guanoctine Hydrochloride, Guanoxabenz, Guanoxan Sulfate, Guanoxyfen Sulfate, Gusperimus Trihydrochloride, Halazepam, Halcinonide, halichondrin B, Halobetasol Propionate, halofantrine, Halofantrine Hydrochloride, Halofenate, Halofuginone Hydrobromide, halomon, Halopemide, Haloperidol, halopredone, Haloprogesterone, Haloprogin, Halothane, Halquinols, Hamycin, Han memopausal gonadotropins, hatomamicin, hatomarubigin A, hatomarubigin B, hatomarubigin C, hatomarubigin D, Heparin Sodium, hepsulfam, heregulin, Hetacillin, Heteronium Bromide, Hexachlorophene:Hydrogen Peroxide, Hexafluorenium Bromide, hexamethylene bisacetamide, Hexedine, Hexobendine, Hexoprenaline Sulfate, Hexylresorcinol, Histamine Phosphate, Histidine, Histoplasmin, Histrelin, Homatropine Hydrobromide, Hoquizil Hydrochloride, Human chorionic gonadotropin, Hycanthone, Hydralazine Hydrochloride, Hydralazine Polistirex, Hydrochlorothiazide, Hydrocodone Bitartrate, Hydrocortisone, Hydroflumethiazide, Hydromorphone Hydrochloride, Hydroxyamphetamine Hydrobromide, Hydroxychloroquine Sulfate, Hydroxyphenamate, Hydroxyprogesterone Caproate, Hydroxyurca, Hydroxyzine Hydrochloride, Hymecromone, Hyoscyamine, hypericin, Ibafloxacin, ibandronic acid, ibogaine, Ibopamine, ibudilast, Ibufenac, Ibuprofen, Ibutilide Fumarate, Icatibant Acetate, Ichthammol, Icotidine, idarubicin, idoxifene, Idoxuridine, idramantone, Iemefloxacin, Iesopitron, Ifetroban, Ifosfamide, Ilepeimide, illimaquinone, ilmofosine, ilomastat, Ilonidap, iloperidone, iloprost, Imafen Hydrochloride, Imazodan Hydrochloride, imidapril, imidazenil, imidazoacridones, Imidecyl Iodine, Imidocarb Hydrochloride, Imidoline Hydrochloride, Imidurea, Imiloxan Hydrochloride, Imipenem, Imipramine Hydrochloride, imiquimod, immunostimulant peptides, Impromidine Hydrochloride, Indacrinone, Indapamide, Indecamide Hydrochloride, Indeloxazine Hydrochloride, Indigotindisulfonate Sodium, indinavir, Indocyanine Green, Indolapril Hydrochloride, Indolidan, indometacin, Indomethacin Sodium, Indoprofen, indoramin, Indorenate Hydrochloride, Indoxole, Indriline Hydrochloride, inocoterone, inogatran, inolimomab, Inositol Niacinate, Insulin, interferons, interleukins, Intrazole, Intriptyline Hydrochloride, iobenguane, Iobenzamic Acid, iobitridol, Iocarmate Meglumine, Iocarmic Acid, Iocetamic Acid, Iodamide, Iodine, Iodipamide Meglumine, Iodixanol, iodoamiloride, Iodoantipyrine I 131, Iodocholesterol I 131, iododoxorubicin, Iodohippurate Sodium I 131, Iodopyracet I 125, Iodoquinol, Iodoxamate Meglumine, Iodoxamie Acid, Ioglicic Acid, Iofetamine Hydrochloride I 123, iofratol, Ioglucol, Ioglucomide, Ioglycamic Acid, Iogulamide, Iohexyl, iomeprol, Iomethin I 125, Iopamidol, Iopanoic Acid, iopentol, Iophendylate, Ioprocemic Acid, iopromide, Iopronic Acid, Iopydol, Iopydone, iopyrol, Iosefamic Acid, Ioseric Acid, Iosulamide Meglumine, Iosumetic Acid, Iotasul, Iotetric Acid, Iothalamate Sodium, Iothalamic Acid, iotriside, Iotrolan, Iotroxic Acid, Iotyrosine I 131, Ioversol, Ioxagiate Sodium, Ioxaglate Meglumine, Ioxaglic Acid, ioxilan, Ioxotrizoic Acid, ipazilide, ipenoxazone, ipidacrine, Ipodate Calcium, ipomeanol, 4-, Ipratropium Bromide, ipriflavone, Iprindole, Iprofenin, Ipronidazole, Iproplatin, Iproxamine Hydrochloride, ipsapirone, irbesartan, irinotecan, irloxacin, iroplact, irsogladine, Irtemazole, isalsteine, Isamoxole, isbogrel, Isepamicin, isobengazole, Isobutamben, Isocarboxazid, Isoconazole, Isoetharine, isofloxythepin, Isoflupredone Acetate, Isoflurane, Isofluorophate, isohomohalicondrin B, Isoleucine, Isomazole Hydrochloride, Isomylamine Hydrochloride, Isoniazid, Isopropamide Iodide, Isopropyl Alcohol, isopropyl unoprostone, Isoproterenol Hydrochloride, Isosorbide, Isosorbide Mononitrate, Isotiquimide, Isotretinoin, Isoxepac, Isoxicam, Isoxsuprine Hydrochloride, isradipine, itameline, itasetron, Itazigrel, itopride, Itraconazole, Ivermectin, jasplakinolide, Josamycin, kahalalide F, Kalafungin, Kanamycin Sulfate, Ketamine Hydrochloride, Ketanserin, Ketazocine, Ketazolam, Kethoxal, Ketipramine Fumarate, Ketoconazole, Ketoprofen, Ketorfanol, ketorolac, Ketotifen Fumarate, Kitasamycin, Labetalol Hydrochloride, Lacidipine, lacidipine, lactitol, lactivicin, laennec, lafutidine, lamellarin-N triacetate, lamifiban, Lamivudine, Lamotrigine, lanoconazole, Lanoxin, lanperisone, lanreotide, Lansoprazole, latanoprost, lateritin, laurocapram, Lauryl Isoquinolinium Bromide, Lavoltidine Succinate, lazabemide, Lecimibide, leinamycin, lemildipine, leminoprazole, lenercept, Leniquinsin, lenograstim, Lenperone, lentinan sulfate, leptin, leptolstatin, lercanidipine, Lergotrile, lerisetron, Letimide Hydrochloride, letrazuril, letrozole, Leucine, leucomyzin, Leuprolide Acetate, leuprolide+estrogen+progesterone-, leuprorelin, Levamfetamine Succinate, levamisole, Levdobutamine Lactobionate, Leveromakalim, levetiracetam, Leveycloserine, levobetaxolol, levobunolol, levobupivacaine, levocabastine, levocarnitine, Levodopa, levodropropizine, levofloxacin, Levofuraltadone, Levoleucovorin Calcium, Levomethadyl Acetate, Levomethadyl Acetate Hydrochloride, levomoprolol, Levonantradol Hydrochloride, Levonordefrin, Levonorgestrel, Levopropoxyphene Napsylate, Levopropylcillin Potassium, levormeloxifene, Levorphanol Tartrate, levosimendan, levosulpiride, Levothyroxine Sodium, Levoxadrol Hydrochloride, Lexipafant, Lexithromycin, liarozole, Libenzapril, Lidamidine Hydrochloride, Lidocaine, Lidofenin, Lidoflazine, Lifarizine, Lifibrate, Lifibrol, Linarotene, Lincomycin, linear polyamine analogue, Linogliride, Linopirdine, linotroban, linsidomine, lintitript, lintopride, Liothyronine I 125, liothyronine sodium, Liotrix, lirexapride, lisinopril, lissoclinamide 7, Lixazinone Sulfate, lobaplatin, Lobenzarit Sodium, Lobucavir, Lodelaben, lodoxamide, Lofemizole Hydrochloride, Lofentanil Oxalate, Lofepramine Hydrochloride, Lofexidine Hydrochloride, lombricine, Lomefloxacin, lomerizine, Lometraline Hydrochloride, lometrexol, Lomofungin, Lomoxicam, Lomustine, Lonapalene, lonazolac, lonidamine, Loperamide Hydrochloride, loracarbef, Lorajmine Hydrochloride, loratadine, Lorazepam, Lorbamate, Lorcamide Hydrochloride, Loreclezole, Loreinadol, lorglumide, Lormetazepam, Lornoxicam, lornoxicam, Lortalamine, Lorzafone, losartan, losigamone, losoxantrone, Losulazine Hydrochloride, loteprednol, lovastatin, loviride, Loxapine, Loxoribine, lubeluzole, Lucanthone Hydrochloride, Lufironil, Lurosetron Mesylate, lurtotecan, luteinizing hormone, lutetium, Lutrelin Acetate, luzindole, Lyapolate Sodium, Lycetamine, lydicamycin, Lydimycin, Lynestrenol, Lypressin, Lysine, lysofylline, lysostaphin, lytic peptides, Maduramicin, Mafenide, magainin 2 amide, Magnesium Salicylate, Magnesium Sulfate, magnolol, maitansine, Malethamer, mallotochromene, mallotojaponin, Malotilate, malotilate, mangafodipir, manidipine, maniwamycin A, Mannitol, mannostatin A, manumycin E, manumycin F, mapinastine, Maprotiline, marimastat, Martek 158708, Martek 92211, Masoprocol, maspin, massetolide, matrilysin inhibitors, Maytansine, Mazapertine Succiniate, Mazindol, Mebendazole, Mebeverine Hydrochloride, Mebrofenin, Mebutamate, Mecamylamine Hydrochloride, Mechlorethamine Hydrochloride, Meclocycline, Meclofenamate Sodium, Mecloqualone, Meclorisone Dibutyrate, Medazepam Hydrochloride, Medorinone, Medrogestone, Medroxalol, Medroxyprogesterone, Medrysone, Meelizine Hydrochloride, Mefenamic Acid, Mefenidil, Mefenorex Hydrochloride, Mefexamide, Mefloquine Hydrochloride, Mefruside, Megalomicin Potassium Phosphate, Megestrol Acetate, Meglumine, Meglutol, Melengestrol Acetate, Melitracen Hydrochloride, Melphalan, Memotine Hydrochloride, Menabitan Hydrochloride, Menoctone, menogaril, Menotropins, Meobentine Sulfate, Mepartricin, Mepenzolate Bromide, Meperidine Hydrochloride, Mephentermine Sulfate, Mephenyloin, Mephobarbital, Mepivacaine Hydrochloride, Meprobamate, Meptazinol Hydrochloride, Mequidox, Meralein Sodium, merbarone, Mercaptopurine, Mercufenol Chloride, Mercury, Ammoniated, Merisoprol Hg 197, Meropenem, Mesalamine, Meseclazone, Mesoridazine, Mesterolone, Mestranol, Mesuprine Hydrochloride, Metalol Hydrochloride, Metaproterenol Polistirex, Metaraminol Bitartrate, Metaxalone, Meteneprost, meterelin, Metformin, Methacholine Chloride, Methacycline, Methadone Hydrochloride, Methadyl Acetate, Methalthiazide, Methamphetamine Hydrochloride, Methaqualone, Methazolamide, Methdilazine, Methenamine, Methenolone Acetate, Methetoin, Methicillin Sodium, Methimazole, methioninase, Methionine, Methisazone, Methixene Hydrochloride, Methocarbamol, Methohexital Sodium, Methopholine, Methotrexate, Methotrimeprazine, methoxatone, Methoxyflurane, Methsuximide, Methyclothiazide, Methyl 10 Palmoxirate, Methylatropine Nitrate, Methylbenzethonium Chloride, Methyldopa, Methyldopate Hydrochloride, Methylene Blue, Methylergonovine Maleate, methylhistamine, R-alpha, methylinosine monophosphate, Methylphenidate Hydrochloride, Methylprednisolone, Methyltestosterone, Methynodiol Diacelate, Methysergide, Methysergide Maleate, Metiamide, Metiapine, Metioprim, metipamide, Metipranolol, Metizoline Hydrochloride, Metkephamid Acetate, metoclopramide, Metocurine Iodide, Metogest, Metolazone, Metopimazine, Metoprine, Metoprolol, Metoquizine, Metrifonate, Metrizamide, Metrizoate Sodium, Metronidazole, Meturedepa, Metyrapone, Metyrosine, Mexiletine Hydrochloride, Mexrenoate Potassium, Mezlocillin, mfonelic Acid, Mianserin Hydrochloride, mibefradil, Mibefradil Dihydrochloride, Mibolerone, michellamine B, Miconazole, microcolin A, Midaflur, Midazolam Hydrochloride, midodrine, mifepristone, Mifobate, miglitol, milacemide, milameline, mildronate, Milenperone, Milipertine, milnacipran, Milrinone, miltefosine, Mimbane Hydrochloride, minaprine, Minaxolone, Minocromil, Minocycline, Minoxidil, Mioflazine Hydrochloride, miokamycin, mipragoside, mirfentanil, mirimostim, Mirincamycin Hydrochloride, Mirisetron Maleate, Mirtazapine, mismatched double stranded RNA, Misonidazole, Misoprostol, Mitindomide, Mitocarcin, Mitocromin, Mitogillin, mitoguazone, mitolactol, Mitomalcin, Mitomycin, mitonafide, Mitosper, Mitotane, mitoxantrone, mivacurium chloride, mivazerol, mixanpril, Mixidine, mizolastine, mizoribine, Moclobemide, modafinil, Modaline Sulfate, Modecamide, moexipril, mofarotene, Mofegiline Hydrochloride, mofezolac, molgramostim, Molinazone, Molindone Hydrochloride, Molsidomine, mometasone, Monatepil Maleate, Monensin, Monoctanoin, Montelukast Sodium, montirelin, mopidamol, moracizine, Morantel Tartrate, Moricizine, Morniflumate, Morphine Sulfate, Morrhuate Sodium, mosapramine, mosapride, motilide, Motretinide, Moxalactam Disodium, Moxazocine, moxiraprine, Moxnidazole, moxonidine, Mumps Skin Test Antigen, mustard anticancer agent, Muzolimine, mycaperoxide B, Mycophenolic Acid, myriaporone, Nabazenil, Nabilone, Nabitan Hydrochloride, Naboctate Hydrochloride, Nabumetone, N-acetyldinaline, Nadide, nadifloxacin, Nadolol, nadroparin calcium, nafadotride, nafamostat, nafarelin, Nafcillin Sodium, Nafenopin, Nafimidone Hydrochloride, Naflocort, Nafomine Malate, Nafoxidine Hydrochloride, Nafronyl Oxalate, Naftifine Hydrochloride, naftopidil, naglivan, nagrestip, Nalbuphine Hydrochloride, Nalidixate Sodium, Nalidixic Acid, nalmefene, Nalmexone Hydrochloride, naloxone+pentazocine, Naltrexone, Namoxyrate, Nandrolone Phenpropionate, Nantradol Hydrochloride, Napactadine Hydrochloride, napadisilate, Napamezole Hydrochloride, napaviin, Naphazoline Hydrochloride, naphterpin, Naproxen, Naproxol, napsagatran, Naranol Hydrochloride, Narasin, naratriptan, nartograstim, nasaruplase, Natamycin, nateplase, Naxagolide Hydrochloride, Nebivolol, Nebramycin, nedaplatin, Nedocromil, Nefazodone Hydrochloride, Neflumozide Hydrochloride, Nefopam Hydrochloride, Nelezaprine Maleate, Nemazoline Hydrochloride, nemorubicin, Neomycin Palmitate, Neostigmine Bromide, neridronic acid, Netilmicin Sulfate, neutral endopeptidase, Neutramycin, Nevirapine, Nexeridine Hydrochloride, Niacin, Nibroxane, Nicardipine Hydrochloride, Nicergoline, Niclosamide, Nicorandil, Nicotinyl Alcohol, Nifedipine, Nifirmerone, Nifluridide, Nifuradene, Nifuraldezone, Nifuratel, Nifuratrone, Nifurdazil, Nifurimide, Nifurpirinol, Nifurquinazol, Nifurthiazole, nilutamide, Nilvadipine, Nimazone, Nimodipine, niperotidine, niravoline, Niridazole, nisamycin, Nisbuterol Mesylate, nisin, Nisobamate, Nisoldipine, Nisoxetine, Nisterime Acetate, Nitarsone, nitazoxamide, nitecapone, Nitrafudam Hydrochloride, Nitralamine Hydrochloride, Nitramisole Hydrochloride, Nitrazepam, Nitrendipine, Nitrocycline, Nitrodan, Nitrofurantoin, Nitrofurazone, Nitroglycerin, Nitromersol, Nitromide, Nitromifene Citrate, Nitrous Oxide, nitroxide antioxidant, nitrullyn, Nivazol, Nivimedone Sodium, Nizatidine, Noberastine, Nocodazole, Nogalamycin, Nolinium Bromide, Nomifensine Maleate, Noracymethadol Hydrochloride, Norbolethone, Norepinephrine Bitartrate, Norethindrone, Norethynodrel, Norfloxacin, Norflurane, Norgestimate, Norgestomet, Norgestrel, Nortriptyline Hydrochloride, Noscapine, Novobiocin Sodium, N-substituted benzaimides, Nufenoxole, Nylestriol, Nystatin, O6-benzylguanine, Obidoxime Chloride, Ocaperidone, Ocfentanil Hydrochloride, Ocinaplon, Octanoic Acid, Octazamide, Octenidine Hydrochloride, Octodrine, Octreotide, Octriptyline Phosphate, Ofloxacin, Oformine, okicenone, Olanzapine, oligonucleotides, olopatadine, olprinone, olsalazine, Olsalazine Sodium, Olvanil, omeprazole, onapristone, ondansetron, Ontazolast, Oocyte maturation inhibitor, Opipramol Hydrochloride, oracin, Orconazole Nitrate, Orgotein, Orlislat, Ormaplatin, Ormetoprim, Ornidazole, Orpanoxin, Orphenadrine Citrate, osaterone, otenzepad, Oxacillin Sodium, Oxagrelate, oxaliplatin, Oxamarin Hydrochloride, oxamisole, Oxamniquine, oxandrolone, Oxantel Pamoate, Oxaprotiline Hydrochloride, Oxaprozin, Oxarbazole, Oxatomide, oxaunomycin, Oxazepam, oxcarbazepine, Oxendolone, Oxethazaine, Oxetorone Fumarate, Oxfendazole, Oxfenicine, Oxibendazole, oxiconazole, Oxidopamine, Oxidronic Acid, Oxifungin Hydrochloride, Oxilorphan, Oximonam, Oximonam Sodium, Oxiperomide, oxiracetam, Oxiramide, Oxisuran, Oxmetidine Hydrochloride, oxodipine, Oxogestone Phenpropionate, Oxolinic Acid, Oxprenolol Hydrochloride, Oxtriphylline, Oxybutynin Chloride, Oxychlorosene, Oxycodone, Oxymetazoline Hydrochloride, Oxymetholone, Oxymorphone Hydrochloride, Oxypertine, Oxyphenbutazone, Oxypurinol, Oxytetracycline, Oxytocin, ozagrel, Ozolinone, Paclitaxel, palauamine, Paldimycin, palinavir, palmitoylrhizoxin, Palmoxirate Sodium, pamaqueside, Pamatolol Sulfate, pamicogrel, Pamidronate Disodium, pamidronic acid, Panadiplon, panamesine, panaxytriol, Pancopride, Pancuronium Bromide, panipenem, pannorin, panomifene, pantethine, pantoprazole, Papaverine Hydrochloride, parabactin, Parachlorophenol, Paraldehyde, Paramethasone Acetate, Paranyline Hydrochloride, Parapenzolate Bromide, Pararosaniline Pamoate, Parbendazole, Parconazole Hydrochloride, Paregoric, Pareptide Sulfate, Pargyline Hydrochloride, parnaparin sodium, Paromomycin Sulfate, Paroxetine, parthenolide, Partricin, Paulomycin, pazelliptine, Pazinaclone, Pazoxide, pazufloxacin, pefloxacin, pegaspargase, Pegorgotein, Pelanserin Hydrochloride, peldesine, Peliomycin, Pelretin, Pelrinone Hydrochloride, Pemedolac, Pemerid Nitrate, pemirolast, Pemoline, Penamecillin, Penbutolol Sulfate, Penciclovir, Penfluridol, Penicillin G Benzathine, Penicillin G Potassium, Penicillin G Procaine, Penicillin G Sodium, Penicillin V, Penicillin V Benzathine, Penicillin V Hydrabamine, Penicillin V Potassium, Pentabamate, Pentaerythritol Tetranitrate, pentafuside, pentamidine, pentamorphone, Pentamustine, Pentapiperium Methylsulfate, Pentazocine, Pentetic Acid, Pentiapine Maleate, pentigetide, Pentisomicin, Pentizidone Sodium, Pentobarbital, Pentomone, Pentopril, pentosan, pentostatin, Pentoxifylline, Pentrinitrol, pentrozole, Peplomycin Sulfate, Pepstatin, perflubron, perfofamide, Perfosfamide, pergolide, Perhexyline Maleate, perillyl alcohol, Perindopril, perindoprilat, Perlapine, Permethrin, perospirone, Perphenazine, Phenacemide, phenaridine, phenazinomycin, Phenazopyridine Hydrochloride, Phenbutazone Sodium Glycerate, Phencarbamide, Phencyclidine Hydrochloride, Phendimetrazine Tartrate, Phenelzine Sulfate, Phenmetrazine Hydrochloride, Phenobarbital, Phenoxybenzamine Hydrochloride, Phenprocoumon, phenserine, phensuccinal, Phensuximide, Phentermine, Phentermine Hydrochloride, phentolamine mesilate, Phentoxifylline, Phenyl Aminosalicylate, phenylacetate, Phenylalanine, phenylalanyl ketoconazole, Phenylbutazone, Phenylephrine Hydrochloride, Phenylpropanolamine Hydrochloride, Phenylpropanolamine Polistirex, Phenyramidol Hydrochloride, Phenyloin, phosphatase inhibitors, Physostigmine, picenadol, picibanil, Picotrin Diolamine, picroliv, picumeterol, pidotimod, Pifamine, Pilocarpine, pilsicamide, pimagedine, Pimetine Hydrochloride, pimilprost, Pimobendan, Pimozide, Pinacidil, Pinadoline, Pindolol, pinnenol, pinocebrin, Pinoxepin Hydrochloride, pioglitazone, Pipamperone, Pipazethate, pipecuronium bromide, Piperacetazine, Piperacillin Sodium, Piperamide Maleate, piperazine, Pipobroman, Piposulfan, Pipotiazine Palmitate, Pipoxolan Hydrochloride, Piprozolin, Piquindone Hydrochloride, Piquizil Hydrochloride, Piracetam, Pirandamine Hydrochloride, pirarubicin, Pirazmonam Sodium, Pirazolac, Pirbenicillin Sodium, Pirbuterol Acetate, Pirenperone, Pirenzepine Hydrochloride, piretanide, Pirfenidone, Piridicillin Sodium, Piridronate Sodium, Piriprost, piritrexim, Pirlimycin Hydrochloride, pirlindole, pirmagrel, Pirmenol Hydrochloride, Pirnabine, Piroctone, Pirodavir, pirodomast, Pirogliride Tartrate, Pirolate, Pirolazamide, Piroxantrone Hydrochloride, Piroxicam, Piroximone, Pirprofen, Pirquinozol, Pirsidomine, Prenylamine, Pituitary, Posterior, Pivampicillin Hydrochloride, Pivopril, Pizotyline, placetin A, platinum compounds, platinum-triamine complex, Plicamycin, Plomestane, Pobilukast Edamine, Podofilox, Poisonoak Extract, Poldine Methylsulfate, Poliglusam, Polignate Sodium, Polymyxin B Sulfate, Polythiazide, Ponalrestat, Porfimer Sodium, Porfiromycin, Potassium Chloride, Potassium Iodide, Potassium Permanganate, Povidone-Iodine, Practolol, Pralidoxime Chloride, Pramiracetam Hydrochloride, Pramoxine Hydrochloride, Pranolium Chloride, Pravadoline Maleate, Pravastatin (Pravachol), Prazepam, Prazosin, Prazosin Hydrochloride, Prednazate, Prednicarbate, Prednimustine, Prednisolone, Prednisone, Prednival, Pregnenolone Succiniate, Prenalterol Hydrochloride, Pridefine Hydrochloride, Prifelone, Prilocalne Hydrochloride, Prilosec, Primaquine Phosphate, Primidolol, Primidone, Prinivil, prinomide Tromethamine, Prinoxodan, Prizidilol Hydrochloride, Proadifen Hydrochloride, Probenecid, Probicromil Calcium, Probucol, Procainamide Hydrochloride, Procaine Hydrochloride, Procarbazine Hydrochloride, Procaterol Hydrochloride, Prochlorperazine, Procinonide, Proclonol, Procyclidine Hydrochloride, Prodilidine Hydrochloride, Prodolic Acid, Profadol Hydrochloride, Progabide, Progesterone, Proglumide, Proinsulin Human, Proline, Prolintane Hydrochloride, Promazine Hydrochloride, Promethazine Hydrochloride, Propafenone Hydrochloride, propagermanium, Propanidid, Propantheline Bromide, Proparacaine Hydrochloride, Propatyl Nitrate, propentofylline, Propenzolate Hydrochloride, Propikacin, Propiomazine, Propionic Acid, propionylcarnitine, L-, propiram, propiram+paracetamol, propiverine, Propofol, Propoxycaine Hydrochloride, Propoxyphene Hydrochloride, Propranolol Hydrochloride, Propulsid, propyl bis-acridone, Propylhexedrine, Propyliodone, Propylthiouracil, Proquazone, Prorenoate Potassium, Proroxan Hydrochloride, Proscillaridin, Prostalene, prostratin, Protamine Sulfate, protegrin, Protirelin, protosufloxacin, Protriptyline Hydrochloride, Proxazole, Proxazole Citrate, Proxicromil, Proxorphan Tartrate, prulifloxacin, Pseudoephedrine Hydrochloride, Puromycin, purpurins, Pyrabrom, Pyrantel, Pamoate, Pyrazinamide, Pyrazofurin, pyrazoloacridine, Pyridostigmine Bromide, Pyrilamine Maleate, Pyrimethamine, Pyrinoline, Pyrithione Sodium, Pyrithione Zinc, Pyrovalerone Hydrochloride, Pyroxamine Maleate, Pyrrocaine, Pyrroliphene Hydrochloride, PyrroInitrin, Pyrvinium Pamoate, Quadazocine Mesylate, Quazepam, Quazinone, Quazodine, Quazolast, quetiapine, quiflapon, quinagolide, Quinaldine Blue, quinapril, Quinaprilat, Quinazosin Hydrochloride, Quinbolone, Quinctolate, Quindecamine Acetate, Quindonium Bromide, Quinelorane Hydrochloride, Quinestrol, Quinfamide, Quingestanol Acetate, Quingestrone, Quinidine Gluconate, Quinielorane Hydrochloride, Quinine Sulfate, Quinpirole Hydrochloride, Quinterenol Sulfate, Quinuclium Bromide, Quinupristin, Quipazine Maleate, Rabeprazole Sodium, Racephenicol, Racepinephrine, raf antagonists, Rafoxamide, Ralitoline, raloxifene, raltitrexed, ramatroban, Ramipril, Ramoplanin, ramosetron, ranelic acid, Ranimycin, Ranitidine, ranolazine, Rauwolfia Serpentina, recainam, Recainam Hydrochloride, Reclazepam, regavirumab, Regramostim, Relaxin, Relomycin, Remacemide Hydrochloride, Remifentanil Hydrochloride, Remiprostol, Remoxipride, Repirinast, Repromicin, Reproterol Hydrochloride, Reserpine, resinferatoxin, Resorcinol, retelliptine demethylated, reticulon, reviparin sodium, revizinone, rhenium Re 186 etidronate, rhizoxin, Ribaminol, Ribavirin, Riboprine, ribozymes, ricasetron, Ridogrel, Rifabutin, Rifametane, Rifamexil, Rifamide, Rifampin, Rifapentine, Rifaximin, retinamide, rilopirox, Riluzole, rimantadine, Rimcazole Hydrochloride, Rimexolone, Rimiterol Hydrobromide, rimoprogin, riodipine, Rioprostil, Ripazepam, ripisartan, Risedronate Sodium, risedronic acid, Risocaine, Risotilide Hydrochloride, rispenzepine, Risperdal, Risperidone, Ritanserin, ritipenem, Ritodrine, Ritolukast, ritonavir, rizatriptan benzoate, Rocastine Hydrochloride, Rocuronium Bromide, Rodocaine, Roflurane, Rogletimide, rohitukine, rokitamycin, Roletamicide, Rolgamidine, Rolicyprine, Rolipram, Rolitetracycline, Rolodine, Romazarit, romurtide, Ronidazole, ropinirole, Ropitoin Hydrochloride, ropivacaine, Ropizine, roquinimex, Rosaramicin, Rosoxacin, Rotoxamine, roxaitidine, Roxarsone, roxindole, roxithromycin, rubiginone Bi, ruboxyl, rufloxacin, rupatidine, Rutamycin, ruzadolane, Sabeluzole, safingol, safironil, saintopin, salbutamol, R-, Salcolex, Salethamide Maleate, Salicyl Alcohol, Salicylamide, Salicylate Meglumine, Salicylic Acid, Salmeterol, Salnacediin, Salsalate, sameridine, sampatrilat, Sancycline, sanfetrinem, Sanguinarium Chloride, Saperconazole, saprisartan, sapropterin, saquinavir, Sarafloxacin Hydrochloride, Saralasin Acetate, SarCNU, sarcophytol A, sargramostim, Sarmoxicillin, Sarpicillin, sarpogrelate, saruplase, saterinone, satigrel, satumomab pendetide, Schick Test Control, Scopafungin, Scopolamine Hydrobromide, Scrazaipine Hydrochloride, Sdi 1 mimetics, Secalciferol, Secobarbital, Seelzone, Seglitide Acetate, selegiline, Selegiline Hydrochloride, Selenium Sulfide, Selenomethionine Se 75, Selfotel, sematilide, semduramicin, semotiadil, semustine, sense oligonucleotides, Sepazonium Chloride, Seperidol Hydrochloride, Seprilose, Seproxetine Hydrochloride, Seractide Acetate, Sergolexole Maleate, Serine, Sermetacin, Sermorelin Acetate, sertaconazole, sertindole, sertraline, setiptiline, Setoperone, sevirumab, sevoflurane, sezolamide, Sibopirdine, Sibutramine Hydrochloride, signal transduction inhibitors, Silandrone, silipide, silteplase, Silver Nitrate, simendan, Simtrazene, Simvastatin, Sincalide, Sinefungin, sinitrodil, sinnabidol, sipatrigine, sirolimus, Sisomicin, Sitogluside, sizofuran, sobuzoxane, Sodium Amylosulfate, Sodium Iodide I 123, Sodium Nitroprusside, Sodium Oxybate, sodium phenylacetate, Sodium Salicylate, solverol, Solypertine Tartrate, Somalapor, Somantadine Hydrochloride, somatomedin B, somatomedin C, somatrem, somatropin, Somenopor, Somidobove, sonermin, Sorbinil, Sorivudine, sotalol, Soterenol Hydrochloride, Sparfloxacin, Sparfosate Sodium, sparfosic acid, Sparsomycin, Sparteine Sulfate, Spectinomycin Hydrochloride, spicamycin D, Spiperone, Spiradoline Mesylate, Spiramycin, Spirapril Hydrochloride, Spiraprilat, Spirogermanium Hydrochloride, Spiromustine, Spironolactone, Spiroplatin, Spiroxasone, splenopentin, spongistatin 1, Sprodiamide, squalamine, Stallimycin Hydrochloride, Stannous Pyrophosphate, Stannous Sulfur Colloid, Stanozolol, Statolon, staurosporine, stavudine, Steffimycin, Stenbolone Acetate, stepronin, Stilbazium Iodide, Stilonium Iodide, stipiamide, Stiripentol, stobadine, Streptomycin Sulfate, Streptonicozid, Streptonigrin, Streptozocin, stromelysin inhibitors, Strontium Chloride Sr 89, succibun, Succimer, Succinylcholine Chloride, Sucralfate, Sucrosofate Potassium, Sudoxicam, Sufentanil, Sufotidine, Sulazepam, Sulbactam Pivoxil, Sulconazole Nitrate, Sulfabenz, Sulfabenzamide, Sulfacetamide, Sulfacytine, Sulfadiazine, Sulfadoxine, Sulfalene, Sulfamerazine, Sulfameter, Sulfamethazine, Sulfamethizole, Sulfamethoxazole, Sulfamonomethoxine, Sulfamoxole, Sulfanilate Zinc, Sulfanitran, sulfasalazine, Sulfasomizole, Sulfazamet, Sulfinalol Hydrochloride, sulfinosine, Sulfinpyrazone, Sulfisoxazole, Sulfomyxin, Sulfonterol Hydrochloride, sulfoxamine, Sulinldac, Sulmarin, Sulnidazole, Suloctidil, Sulofenur, sulopenem, Suloxifen Oxalate, Sulpiride, Sulprostone, sultamicillin, Sulthiame, sultopride, sulukast, Sumarotene, sumatriptan, Suncillin Sodium, Suproclone, Suprofen, suradista, suramin, Surfomer, Suricamide Maleate, Suritozole, Suronacrine Maleate, Suxemerid Sulfate, swainsonine, symakalim, Symclosene, Symetine Hydrochloride, synthetic glycosaminoglycans, Taciamine Hydrochloride, Tacrine Hydrochloride, Tacrolimus, Talampicillin Hydrochloride, Taleranol, Talisomycin, tallimustine, Talmetacin, Talniflumate, Talopram Hydrochloride, Talosalate, Tametraline Hydrochloride, Tamoxifen, Tampramine Fumarate, Tamsulosin Hydrochloride, Tandamine Hydrochloride, tandospirone, tapgen, taprostene, Tasosartan, tauromustine, Taxane, Taxoid, Tazadolene Succinate, tazanolast, tazarotene, Tazifylline Hydrochloride, Tazobactam, Tazofelone, Tazolol Hydrochloride, Tebufelone, Tebuquine, Technetium Tc 99 m Bicisate, Teclozan, Tecogalan Sodium, Teecleukin, Teflurane, Tegafur, Tegretol, Teicoplanin, telenzepine, tellurapyrylium, telmesteine, telmisartan, telomerase inhibitors, Teloxantrone Hydrochloride, Teludipine Hydrochloride, Temafloxacin Hydrochloride, Tematropium Methyl sulfate, Temazepam, Temelastine, temocapril, Temocillin, temoporfin, temozolomide, Tenidap, Teniposide, tenosal, tenoxicam, tepirindole, Tepoxalin, Teprotide, terazosin, Terbinafine, Terbutaline Sulfate, Terconazole, terfenadine, terflavoxate, terguride, Teriparatide Acetate, terlakiren, terlipressin, terodiline, Teroxalene Hydrochloride, Teroxirone, tertatolol, Tesicam, Tesimide, Testolactone, Testosterone, Tetracaine, tetrachlorodecaoxide, Tetracycline, Tetrahydrozoline Hydrochloride, Tetramisole Hydrochloride, Tetrazolast Meglumine, tetrazomine, Tetrofosmin, Tetroquinone, Tetroxoprim, Tetrydamine, thaliblastine, Thalidomide, Theofibrate, Theophylline, Thiabendazole, Thiamiprine, Thiamphenicol, Thiamylal, Thiazesim Hydrochloride, Thiazinamium Chloride, Thiethylperazine, Thimerfonate Sodium, Thimerosal, thiocoraline, thiofedrine, Thioguanine, thiomarinol, Thiopental Sodium, thioperamide, Thioridazine, Thiotepa, Thiothixene, Thiphenamil Hydrochloride, Thiphencillin Potassium, Thiram, Thozalinone, Threonine, Thrombin, thrombopoietin, thrombopoietin mimetic, thymalfasin, thymopoietin receptor agonist, thymotrinan, Thyromedan Hydrochloride, Thyroxine 1 125, Thyroxine 1 131, Tiacrilast, Tiacrilast Sodium, tiagabine, Tiamenidine, tianeptine, tiapafant, Tiapamil Hydrochloride, Tiaramide Hydrochloride, Tiazofurin, Tibenelast Sodium, Tibolone, Tibric Acid, Ticabesone Propionate, Ticarbodine, Ticarcillin Cresyl Sodium, Ticlatone, ticlopidine, Ticrynafen, tienoxolol, Tifurac Sodium, Tigemonam Dicholine, Tigestol, Tiletamine Hydrochloride, Tilidine Hydrochloride, tilisolol, tilnoprofen arbamel, Tilorone Hydrochloride, Tiludronate Disodium, tiludronic acid, Timefurone, Timobesone Acetate, Timolol, tin ethyl etiopurpurin, Tinabinol, Timidazole, Tinzaparin Sodium, Tioconazole, Tiodazosin, Tiodonium Chloride, Tioperidone Hydrochloride, Tiopinac, Tiospirone Hydrochloride, Tiotidine, tiotropium bromide, Tioxidazole, Tipentosin Hydrochloride, Tipredane, Tiprenolol Hydrochloride, Tiprinast Meglumine, Tipropidil Hydrochloride, Tiqueside, Tiquinamide Hydrochloride, tirandalydigin, Tirapazamine, tirilazad, tirofiban, tiropramide, titanocene dichloride, Tixanox, Tixocortol Pivalate, Tizanidine Hydrochloride, Tobramycin, Tocamide, Tocamphyl, Tofenacin Hydrochloride, Tolamolol, Tolazamide, Tolazoline Hydrochloride, Tolbutamide, Tolcapone, Tolciclate, Tolfamide, Tolgabide, lamotrigine, Tolimidone, Tolindate, Tolmetin, Tolnaftate, Tolpovidone 1 131, Tolpyrramide, Tolrestat, Tomelukast, Tomoxetine Hydrochloride, Tonazocine Mesylate, Topiramate, topotecan, Topotecan Hydrochloride, topsentin, Topterone, Toquizine, torasemide, toremifene, Torsemide, Tosifen, Tosufloxacin, totipotent stem cell factor, Tracazolate, trafermin, Tralonide, Tramadol Hydrochloride, Tramazoline Hydrochloride, trandolapril, Tranexamic Acid, Tranilast, Transcamide, translation inhibitors, traxanox, Trazodone Hydrochloride, Trazodone-HCL, Trebenzomine Hydrochloride, Trefentanil Hydrochloride, Treloxinate, Trepipam Maleate, Trestolone Acetate, tretinoin, Triacetin, triacetyluridine, Triafungin, Triamcinolone, Triampyzine Sulfate, Triamterene, Triazolam, Tribenoside, tricaprilin, Tricetamide, Trichlormethiazide, trichohyalin, triciribine, Tricitrates, Triclofenol piperazine, Triclofos Sodium, Triclonide, trientine, Trifenagrel, triflavin, Triflocin, Triflubazam, Triflumidate, Trifluoperazine Hydrochloride, Trifluperidol, Triflupromazine, Triflupromazine Hydrochloride, Trifluridine, Trihexyphenidyl Hydrochloride, Trilostane, Trimazosin Hydrochloride, trimegestone, Trimeprazine Tartrate, Trimethadione, Trimethaphan Camsylate, Trimethobenzamide Hydrochloride, Trimethoprim, Trimetozine, Trimetrexate, Trimipramine, Trimoprostil, Trimoxamine Hydrochloride, Triolein 1 125, Triolein 1 131, Trioxifene Mesylate, Tripamide, Tripelennamine Hydrochloride, Triprolidine Hydrochloride, Triptorelin, Trisulfapyrimidines, Troclosene Potassium, troglitazone, Trolamine, Troleandomycin, trombodipine, trometamol, Tropanserin Hydrochloride, Tropicamide, tropine ester, tropisetron, trospectomycin, trovafloxacin, trovirdine, Tryptophan, Tuberculin, Tubocurarine Chloride, Tubulozole Hydrochloride, tucarcsol, tulobuterol, turosteride, Tybamate, tylogenin, Tyropanoate Sodium, Tyrosine, Tyrothricin, tyrphostins, ubenimex, Uldazepam, Undecylenic Acid, Uracil Mustard, urapidil, Urea, Uredepa, uridine triphosphate, Urofollitropin, Urokinase, Ursodiol, valaciclovir, Valine, Valnoctamide, Valproate Sodium, Valproic Acid, valsartan, vamicamide, vanadeine, Vancomycin, vaminolol, Vapiprost Hydrochloride, Vapreotide, variolin B, Vasopressin, Vecuronium Bromide, velaresol, Velnacrine Maleate, venlafaxine, veradoline Hydrochloride, veramine, Verapamil Hydrochloride, verdins, Verilopam Hydrochloride, Verlukast, Verofylline, veroxan, verteporfin, Vesnarinone, vexibinol, Vidarabine, vigabatrin, Viloxazine Hydrochloride, Vinblastine Sulfate, vinburnine citrate, Vincofos, vinconate, Vincristine Sulfate, Vindesine, Vindesine Sulfate, Vinepidine Sulfate, Vinglycinate Sulfate, Vinleurosine Sulfate, vinorelbine, vinpocetine, vintoperol, vinxaltine, Vinzolidine Sulfate, Viprostol, Virginiamycin, Viridofulvin, Viroxime, vitaxin, Volazocine, voriconazole, vorozole, voxergolide, Warfarin Sodium, Xamoterol, Xanomeline, Xanoxate Sodium, Xanthinol Niacinate, xemilofiban, Xenalipin, Xenbucin, Xilobam, ximoprofen, Xipamide, Xorphanol Mesylate, Xylamidine Tosylate, Xylazine Hydrochloride, Xylometazoline Hydrochloride, Xylose, yangambin, zabicipril, zacopride, zafirlukast, Zalcitabine, zaleplon, zalospirone, Zaltidine Hydrochloride, zaltoprofen, zanamivir, zankiren, zanoterone, Zantac, Zarirlukast, zatebradine, zatosetron, Zatosetron Maleate, zenarestat, Zenazocine Mesylate, Zeniplatin, Zeranol, Zidometacin, Zidovudine, zifrosilone, Zilantel, zilascorb, zileuton, Zimeldine Hydrochloride, Zinc Undecylenate, Zindotrine, Zinoconazole Hydrochloride, Zinostatin, Zinterol Hydrochloride, Zinviroxime, ziprasidone, Zobolt, Zofenopril Calcium, Zofenoprilat, Zolamine Hydrochloride, Zolazepam Hydrochloride, zoledronie acid, Zolertine Hydrochloride, zolmitriptan, zolpidem, Zomepirac Sodium, Zometapine, Zoniclezole Hydrochloride, Zonisamide, zopiclone, Zopolrestat, Zorbamyciin, Zorubicin Hydrochloride, zotepine, Zucapsaicin, JTT-501 (PNU-182716) (Reglitazar), AR-H039122, MCC-555 (Netoglitazone), AR-H049020, Tesaglitazar), CS-011 (CI-1037), GW-409544X, KRP-297, RG-12525, BM-15.2054, CLX-0940, CLX-0921, DRF-2189, GW-1929, GW-9820, LR-90, LY-510929, NIP-221, NIP-223, JTP-20993, LY 29311 Na, FK 614, BMS 298585, R 483, TAK 559, DRF 2725 (Ragaglitazar), L-686398, L-168049, L-805645, L-054852, Demethyl asteriquinone B1 (L-783281), L-363586, KRP-297, P32/98, CRE-16336, EML-1625, pharmaceutically acceptable salts thereof, or a biologically active fragment, variant or derivative thereof, or a combination thereof. In some embodiments, a biologically active agent is selected from: leuprolide, octreotide, brimonidine, latanoprost, latanoprost acid, travoprost, travoprost acid, brinzolamide, dorzolamide, betaxolol, terbinafine, risperidone, and/or rapamycin, or a combination thereof.

[0341] Carbohydrate: The term “carbohydrate”, as used herein, refers to a biological molecule comprising carbon, oxygen and hydrogen; in some embodiments, a carbohydrate includes a saccharide, a sugar, a starch or cellulose. In some embodiments, saccharides include monosaccharides, disaccharides, oligosaccharides and polysaccharides. In some embodiments, a polysaccharide acts as a structural component or for energy storage. In some embodiments, a carbohydrate is involved in the immune system, fertilization, preventing pathogenesis, blood clotthing and/or development. In some embodiments, a biologically active agent comprises a carbohydrate.

[0342] Cellpenetrating peptide: The terms “cell penetrating peptide”, “cell penetrating protein”, “CPP” and the like, as used herein, refer to a peptide or protein having an ability to pass through cellular membranes. In various embodiments, a CPP is conjugated to a biologically active agent to facilitate transport of the agent across the membrane. In some embodiments, the CPP is useful in facilitating the uptake of such agents across cell membranes, such as the plasma membrane of a mammalian cell and/or the nuclear membrane of a mammalian cell. In some embodiments, a CPP is capable of being internalized into a cell and passing cellular membranes (including, inter alia, the outer “limiting” cell membrane (also commonly referred to as “plasma membrane”), endosomal membranes, and membranes of the endoplasmatic reticulum) and/or directing the passage of a given agent or cargo through these cellular membranes. In some embodiments, any possible mechanism of internalization is envisaged including both energy-dependent (i.e. active) transport mechanisms (e.g., endocytosis) and energy-independent (i.e. passive) transport mechanism (e.g., diffusion). In various embodiments, internalization includes involving the localization of at least a part of the peptides that passed through the plasma cellular membrane into the cytoplasma (in contrast to localization in different cellular compartments such as vesicles, endosomes or in the nucleus). A non-limiting example of a CPP is a peptide having amino acid sequence GRKKRRQRRRPPQ (SEQ ID NO: 2) (Vives; E. et al. (1997), supra). Non-limiting examples of CPPs include the HIV-1 TAT translocation domain (Green; M. and Loewenstein, P. M. (1988) Cell 55, 1179-1188) and the homeodomain of the Antennapedia protein from Drosophila (Joliot; A. et al. (1991) Proc. Natl. Acad. Sci. USA 88, 1864-1868); a sequence of 16 amino acids called penetratin or pAntp of the Antennapedia protein (Derossi, D. et al. (1994) J. Biol. Chem. 269, 10444-10450); a basic sequence of the HIV-1 Tat protein (Vives, E. et al. (1997) J. Biol. Chem. 272, 16010-16017); and a synthetic peptide developed is the amphipathic model peptide MAP (Oehlke, J. et al. (1998) Biochim. Biophys. Acta 1414, 127-139). Additional non-limiting examples of CPPs are described in U.S. Pat. Nos. 9,303,076; and 9,302,014.

[0343] Characteristic portion: As used herein, the phrase a “characteristic portion” of a protein or polypeptide is one that contains a continuous stretch of amino acids, or a collection of continuous stretches of amino acids, that together are characteristic of a protein or polypeptide. Each such continuous stretch generally will contain at least two amino acids. Furthermore, those of ordinary skill in the art will appreciate that typically at least 5, 10, 15, 20 or more amino acids are required to be characteristic of a protein. In general, a characteristic portion is one that, in addition to the sequence identity specified above, shares at least one functional characteristic with the relevant intact protein.

[0344] Characteristic sequence: A “characteristic sequence”, as used herein, is a sequence that is found in all members of a family of polypeptides or nucleic acids, and therefore can be used by those of ordinary skill in the art to define members of the family.

[0345] Characteristic structural element: The term “characteristic structural element”, as used herein, refers to a distinctive structural element (e.g., core structure, collection of pendant moieties, sequence element, etc) that is found in all members of a family of polypeptides, small molecules, or nucleic acids, and therefore can be used by those of ordinary skill in the art to define members of the family.

[0346] Chemotherapeutic agent: The term “chemotherapeutic agent”, as used herein, refers to a drug or agent capable of killing growing cells, including cancer cells. Chemotherapeutic agents are frequently used to treat various forms of cancer. In some embodiments, non-limiting examples of chemotherapeutic agents include adriamycin, paclitaxel (Taxol), docetaxel (Taxotere), actinomycin D, doxorubicin, daunorubicin, valrubicin, idarubicin, epirubicin, bleomycin, plicamycin, camptothecin and derivatives, bleomycin, etoposide, teniposide, mitomycin, vinca alkaloids, such as vinblastine and vincristine, and platinum-based compounds such as cisplatin, gemcitabine. In some embodiments, a composition comprises a lipid and a portion of a chemotherapeutic agent capable of mediating at least one function of a chemotherapeutic agent.

[0347] Comparable: The term “comparable”, as used herein, is used herein to describe two (or more) sets of conditions or circumstances that are sufficiently similar to one another to permit comparison of results obtained or phenomena observed. In some embodiments, comparable sets of conditions or circumstances are characterized by a plurality of substantially identical features and one or a small number of varied features. Those of ordinary skill in the art will appreciate that sets of conditions are comparable to one another when characterized by a sufficient number and type of substantially identical features to warrant a reasonable conclusion that differences in results obtained or phenomena observed under the different sets of conditions or circumstances are caused by or indicative of the variation in those features that are varied.

[0348] Conjugate: The term “conjugate”, as used herein, refers to a composition comprising two or more components, moieties or molecules which are physically linked together, e.g., by a covalent bond, either directly or indirectly (as a non-limiting example, with one or more linkers interposed between two adjacent components, moieties or molecules). The term “conjugated”, as used herein, in reference to a composition comprising two or more components, moieties or molecules, references the state the two or more components, moieties or molecules are physically linked together. In some embodiments, a composition comprises a lipid and a biologically active agent, wherein the lipid and the biologically active agent are conjugated.

[0349] CRISPR and related terms: The term “CRISPR”, “CRISPR/Cas system” and the like, as used herein, refers to a biologically active system involving clustered regularly-interspaced short palindromic repeats (CRISPR), which are segments of prokaryotic DNA containing short repetitions of base sequences, or various artificial systems derived or inspired by the naturally-occurring prokaryotic system. In some embodiments, a biologically active agent comprises a component of a CRISPR/Cas system. In some embodiments, a component of a CRISPR/Cas system include, without limitation: a gene encoding a Cas protein (including, as non-limiting examples, Cas9, dCas9, and variants thereof, both naturally-occurring and artificial) or the protein itself, a guide RNA; any component of a CAS crRNA complex; a cas (CRISPR-associated) gene or gene product; and any other biologically active molecule involved in a naturally-occurring or artificial CRISPR/Cas system. See, for example, Jinek et al. 2012 Science 337: 816-821; Cong et al. 2013 Science 339: 819-823; U.S. Pat. App. 20140234972; DiCarlo 2013 Nucl. Acids Res. 41: 4336-43; Hwang et al. 2013 Nat. Biotech. 31: 227-9; and Flowers et al. 2014 Development 141: 2165-71.

[0350] Cycloaliphatic: The term “cycloaliphatic,” as used herein, refers to saturated or partially unsaturated aliphatic monocyclic, bicyclic, or polycyclic ring systems having, e.g., from 3 to 30, members, wherein the aliphatic ring system is optionally substituted. Cycloaliphatic groups include, without limitation, cyclopropyl, cyclobutyl, cyclopentyl, cyclopentenyl, cyclohexyl, cyclohexenyl, cycloheptyl, cycloheptenyl, cyclooctyl, cyclooctenyl, norbornyl, adamantyl, and cyclooctadienyl. In some embodiments, the cycloalkyl has 3-6 carbons. The terms “cycloaliphatic” may also include aliphatic rings that are fused to one or more aromatic or nonaromatic rings, such as decahydronaphthyl or tetrahydronaphthyl, where the radical or point of attachment is on the aliphatic ring. In some embodiments, a carbocyclic group is bicyclic. In some embodiments, a carbocyclic group is tricyclic. In some embodiments, a carbocyclic group is polycyclic. In some embodiments, “cycloaliphatic” (or “carbocycle” or “cycloalkyl”) refers to a monocyclic C₃-C₆ hydrocarbon, or a C₅-C₁₀ bicyclic hydrocarbon that is completely saturated or that contains one or more units of unsaturation, but which is not aromatic, that has a single point of attachment to the rest of the molecule, or a C₉-C₁₆ tricyclic hydrocarbon that is completely saturated or that contains one or more units of unsaturation, but which is not aromatic, that has a single point of attachment to the rest of the molecule.

[0351] Dosing regimen: As used herein, a “dosing regimen” or “therapeutic regimen” refers to a set of unit doses (typically more than one) that are administered individually to a subject, typically separated by periods of time. In some embodiments, a given therapeutic agent has a recommended dosing regimen, which may involve one or more doses. In some embodiments, a dosing regimen comprises a plurality of doses each of which are separated from one another by a time period of the same length; in some embodiments, a dosing regime comprises a plurality of doses and at least two different time periods separating individual doses. In some embodiments, all doses within a dosing regimen are of the same unit dose amount. In some embodiments, different doses within a dosing regimen are of different amounts. In some embodiments, a dosing regimen comprises a first dose in a first dose amount, followed by one or more additional doses in a second dose amount different from the first dose amount. In some embodiments, a dosing regimen comprises a first dose in a first dose amount, followed by one or more additional doses in a second dose amount same as the first dose amount.

[0352] Equivalent agents: Those of ordinary skill in the art, reading the present disclosure, will appreciate that the scope of useful agents in the context of the present invention is not limited to those specifically mentioned or exemplified herein. In particular, those skilled in the art will recognize that active agents typically have a structure that consists of a core and attached pendant moieties, and furthermore will appreciate that simple variations of such core and/or pendant moieties may not significantly alter activity of the agent. For example, in some embodiments, substitution of one or more pendant moieties with groups of comparable three-dimensional structure and/or chemical reactivity characteristics may generate a substituted compound or portion equivalent to a parent reference compound or portion. In some embodiments, addition or removal of one or more pendant moieties may generate a substituted compound equivalent to a parent reference compound. In some embodiments, alteration of core structure, for example by addition or removal of a small number of bonds (typically not more than 5, 4, 3, 2, or 1 bonds, and often only a single bond) may generate a substituted compound equivalent to a parent reference compound. In many embodiments, equivalent compounds may be prepared by methods illustrated in general reaction schemes as, for example, described below, or by modifications thereof, using readily available starting materials, reagents and conventional or provided synthesis procedures. In these reactions, it is also possible to make use of variants, which are in themselves known, but are not mentioned here.

[0353] Equivalent Dosage: The term “equivalent dosage”, as used herein, is used herein to compare dosages of different pharmaceutically active agents that effect the same biological result. Dosages of two different agents are considered to be “equivalent” to one another in accordance with the present invention if they achieve a comparable level or extent of the biological result. In some embodiments, equivalent dosages of different pharmaceutical agents for use in accordance with the present invention are determined using in vitro and/or in vivo assays as described herein. In some embodiments, one or more lysosomal activating agents for use in accordance with the present invention is utilized at a dose equivalent to a dose of a reference lysosomal activating agent; in some such embodiments, the reference lysosomal activating agent for such purpose is selected from the group consisting of small molecule allosteric activators (e.g., pyrazolpyrimidines), imminosugars (e.g., isofagomine), antioxidants (e.g., n-acetyl-cysteine), and regulators of cellular trafficking (e.g., Rabla polypeptide).

[0354] Halogen: The term “halogen”, as used herein, means F, Cl, Br, or I.

[0355] Heteroaliphatic: The term “heteroaliphatic”, as used herein, is given its ordinary meaning in the art and refers to aliphatic groups as described herein in which one or more carbon atoms are independently replaced with one or more heteroatoms (e.g., oxygen, nitrogen, sulfur, silicon, phosphorus, and the like). In some embodiments, one or more units selected from C, CH, CH₂, or CH₃ are independently replaced by one or more heteroatoms (including oxidized and/or substituted form thereof). In some embodiments, a heteroaliphatic group is heteroalkyl. In some embodiments, a heteroaliphatic group is heteroalkenyl.

[0356] Heteroalkyl: The term “heteroalkyl”, as used herein, is given its ordinary meaning in the art and refers to alkyl groups as described herein in which one or more carbon atoms are independently replaced with one or more heteroatoms (e.g., oxygen, nitrogen, sulfur, silicon, phosphorus, and the like). Examples of heteroalkyl groups include, but are not limited to, alkoxy, poly(ethylene glycol)-, alkyl-substituted amino, tetrahydrofuranyl, piperidinyl, morpholinyl, etc.

[0357] Heteroaryl: The terms “heteroaryl” and “heteroar-”, as used herein, used alone or as part of a larger moiety, e.g., “heteroaralkyl,” or “heteroaralkoxy,” refer to monocyclic, bicyclic or polycyclic ring systems having a total of five to thirty ring members, wherein at least one ring in the system is aromatic and at least one aromatic ring atom is a heteroatom. In some embodiments, a heteroaryl group is a group having 5 to 10 ring atoms (i.e., monocyclic, bicyclic or polycyclic), in some embodiments 5, 6, 9, or 10 ring atoms. In some embodiments, a heteroaryl group has 6, 10, or 14 π electrons shared in a cyclic array; and having, in addition to carbon atoms, from one to five heteroatoms. Heteroaryl groups include, without limitation, thienyl, furanyl, pyrrolyl, imidazolyl, pyrazolyl, triazolyl, tetrazolyl, oxazolyl, isoxazolyl, oxadiazolyl, thiazolyl, isothiazolyl, thiadiazolyl, pyridyl, pyridazinyl, pyrimidinyl, pyrazinyl, indolizinyl, purinyl, naphthyridinyl, and pteridinyl. In some embodiments, a heteroaryl is a heterobiaryl group, such as bipyridyl and the like. The terms “heteroaryl” and “heteroar-”, as used herein, also include groups in which a heteroaromatic ring is fused to one or more aryl, cycloaliphatic, or heterocyclyl rings, where the radical or point of attachment is on the heteroaromatic ring. Non-limiting examples include indolyl, isoindolyl, benzothienyl, benzofuranyl, dibenzofuranyl, indazolyl, benzimidazolyl, benzthiazolyl, quinolyl, isoquinolyl, cinnolinyl, phthalazinyl, quinazolinyl, quinoxalinyl, 4H-quinolizinyl, carbazolyl, acridinyl, phenazinyl, phenothiazinyl, phenoxazinyl, tetrahydroquinolinyl, tetrahydroisoquinolinyl, and pyrido[2,3-b]-1,4-oxazin-3(4H)-one. A heteroaryl group may be monocyclic, bicyclic or polycyclic. The term “heteroaryl” may be used interchangeably with the terms “heteroaryl ring,” “heteroaryl group,” or “heteroaromatic,” any of which terms include rings that are optionally substituted. The term “heteroaralkyl” refers to an alkyl group substituted by a heteroaryl group, wherein the alkyl and heteroaryl portions independently are optionally substituted.

[0358] Heteroatom: The term “heteroatom”, as used herein, means an atom that is not carbon or hydrogen. In some embodiments, a heteroatom is oxygen, sulfur, nitrogen, phosphorus, or silicon (including any oxidized form of nitrogen, sulfur, phosphorus, or silicon; the quaternized form of any basic nitrogen or a substitutable nitrogen of a heterocyclic ring (for example, N as in 3,4-dihydro-2H-pyrrolyl), NH (as in pyrrolidinyl) or NR⁺ (as in N-substituted pyrrolidinyl); etc.).

[0359] Heterocyclyl: As used herein, the terms “heterocycle,” “heterocyclyl,” “heterocyclic radical,” and “heterocyclic ring”, as used herein, are used interchangeably and refer to a monocyclic, bicyclic or polycyclic ring moiety (e.g., 3-30 membered) that is saturated or partially unsaturated and has one or more heteroatom ring atoms. In some embodiments, a heterocyclyl group is a stable 5- to 7-membered monocyclic or 7- to 10-membered bicyclic heterocyclic moiety that is either saturated or partially unsaturated, and having, in addition to carbon atoms, one or more, preferably one to four, heteroatoms, as defined above. When used in reference to a ring atom of a heterocycle, the term “nitrogen” includes substituted nitrogen. As an example, in a saturated or partially unsaturated ring having 0-3 heteroatoms selected from oxygen, sulfur or nitrogen, the nitrogen may be N (as in 3,4-dihydro-2H-pyrrolyl), NH (as in pyrrolidinyl), or ⁺NR (as in N-substituted pyrrolidinyl). A heterocyclic ring can be attached to its pendant group at any heteroatom or carbon atom that results in a stable structure and any of the ring atoms can be optionally substituted. Examples of such saturated or partially unsaturated heterocyclic radicals include, without limitation, tetrahydrofuranyl, tetrahydrothienyl, pyrrolidinyl, piperidinyl, pyrrolinyl, tetrahydroquinolinyl, tetrahydroisoquinolinyl, decahydroquinolinyl, oxazolidinyl, piperazinyl, dioxanyl, dioxolanyl, diazepinyl, oxazepinyl, thiazepinyl, morpholinyl, and quinuclidinyl. The terms “heterocycle,” “heterocyclyl,” “heterocyclyl ring,” “heterocyclic group,” “heterocyclic moiety,” and “heterocyclic radical,” are used interchangeably herein, and also include groups in which a heterocyclyl ring is fused to one or more aryl, heteroaryl, or cycloaliphatic rings, such as indolinyl, 3H-indolyl, chromanyl, phenanthridinyl, or tetrahydroquinolinyl. A heterocyclyl group may be monocyclic, bicyclic or polycyclic. The term “heterocyclylalkyl” refers to an alkyl group substituted by a heterocyclyl, wherein the alkyl and heterocyclyl portions independently are optionally substituted.

[0360] Immunomodulatory nucleic acid and CpG oligonucleotide and related terms: The term “immunomodulatory nucleic acid”, as used herein, refers to a nucleic acid which is capable of modulating an immune response, e.g., in a mammal, e.g., in a human subject. In various embodiments, the immunomodulatory nucleic acid is capable of stimulating (agonizing) an immune response; in other embodiments, different immunomodulatory nucleic acids are capable of decreasing (antagonizing) an immune response. In non-limiting examples, an immunomodulatory nucleic acid includes a CpG oligonucleotide. The term “CpG oligonucleotide”, as used herein, refers to an oligonucleotide comprising an unmethylated CpG motif, wherein the oligonucleotide can comprise nucleotides, modified nucleotides and/or nucleotide analogs. In some embodiments, a CpG oligonucleotide is capable of agonizing a TLR9-mediated and/or TLR9-associated immune response in at least one assay; in some embodiments, a CpG oligonucleotide is capable of antagonizing an immune response in at least one assay. Others do neither. In some embodiments, a CpG oligonucleotide can optionally comprise modifications of the sugar, base or phosphate (phosphodiester), as well as secondary and tertiary structures. See, for example, Vollmer et al. 2009 Adv. Drug. Del. Rev. 61: 195-204. In some embodiments, an example of a modified phosphodiester is a phosphorothioate. In some embodiments, one or more phosphorothioates (PS) is incorporated into the backbone of a CpG oligonucleotide (in place of a phosphodiester or PO); the PS can reportedly reduce nuclease degradation and, in at least some cases, enhance the immunogenic activity of the CpG oligonucleotide 10- to 100-fold. Vollmer et al. 2009 Adv. Drug Del. Rev. 61: 195-204. In some embodiments, a CpG oligonucleotide can comprise all phosphodiesters in the backbone; or a mixture of phosphodiesters and internucleoside linkers in the backbone; or all internucleoside linkers in the backbone. For example, WO 2015/108047 reports CpG oligonucleotides with a mixture of phosphodiester and internucleoside (e.g., phosphorothioate) linkages; in this case, the CpG region motif comprises phosphodiesters, with phosphorothioates flanking the CpG region motif. In various embodiments, the CpG oligonucleotide can comprise a phosphorothioate which is in the Rp or Sp conformation. The terms “CpG ODN” or “CpG oligodeoxynucleotide” as used in the literature, and as used herein, are not strictly limited to oligonucleotides wherein “p” is a phosphate; these terms have previously been used in the literature and are used herein to encompass oligonucleotides which comprise one or more phosphorothioates in place of phosphodiesters, or even comprise all phosphorothioates in their backbones, and/or other modifications. In some embodiments, an “immunostimulatory” CpG oligonucleotide is capable of agonizing an immune response. In some embodiments, a CpG oligonucleotide can comprise one strand; or, optionally, it can further comprise a second or other additional strands. In some embodiments, a CpG oligonucleotide can further comprise or be conjugated to other components which are not nucleotides. In some embodiments, a composition comprises a lipid and a portion of an immunomodulatory nucleic acid capable of mediating at least one function of an immunomodulatory nucleic acid.

[0361] Intraperitoneal: The phrases “intraperitoneal administration” and “administered intraperitonealy” as used herein have their art-understood meaning referring to administration of a compound or composition into the peritoneum of a subject.

[0362] In vitro: As used herein, the term “in vitro” refers to events that occur in an artificial environment, e.g., in a test tube or reaction vessel, in cell culture, etc., rather than within an organism (e.g., animal, plant, and/or microbe).

[0363] In vivo: As used herein, the term “in vivo” refers to events that occur within an organism (e.g., animal, plant, and/or microbe).

[0364] Linker: The term “linker”, as used herein, refers to a moiety that connects two parts of a composition; as a non-limiting example, a linker physically connects a biologically active agent to a lipid. Non-limiting examples of suitable linkers include: an uncharged linker; a charged linker; a linker comprising an alkyl; a linker comprising a phosphate; a branched linker; an unbranched linker; a linker comprising at least one cleavage group; a linker comprising at least one redox cleavage group; a linker comprising at least one phosphate-based cleavage group; a linker comprising at least one acid-cleavage group; a linker comprising at least one ester-based cleavage group; a linker comprising at least one peptide-based cleavage group. Other non-limiting examples of linkers are described herein, or detailed in FIG. 7.

[0365] Lower alkyl: The term “lower alkyl”, as used herein, refers to a C₁₋₄ straight or branched alkyl group. Example lower alkyl groups are methyl, ethyl, propyl, isopropyl, butyl, isobutyl, and tert-butyl.

[0366] Lipid: The term “lipid”, as used herein, refers to any member of a large group of molecules which are generally at least partially hydrophobic or amphiphilic, and include, inter alia, phospholipids, triglycerides, diglycerides, monoglycerides, fat-soluble vitamins, sterols, fats and waxes. In some embodiments, lipids include fatty acids, glycerolipids, glycerophospholipids, sphingolipids, sterol lipids, prenol lipids, saccharolipids, polyketides, and other molecules. In some embodiments, the present disclosure pertains to a composition comprising a biologically active agent and a lipid comprising a C₁₀-C₈₀ linear, saturated or partially unsaturated, aliphatic chain. In some embodiments, the present disclosure pertains to a composition comprising a biologically active agent and a lipid comprising a C₁₀-C₈₀ linear, saturated or partially unsaturated, aliphatic chain, optionally substituted with one or more C₁₋₄ aliphatic group. In some embodiments, the present disclosure pertains to a composition comprising a biologically active agent and a lipid comprising a C₁₀-C₆₀ linear, saturated or partially unsaturated, aliphatic chain. In some embodiments, the present disclosure pertains to a composition comprising a biologically active agent and a lipid comprising a C₁₀-C₆₀ linear, saturated or partially unsaturated, aliphatic chain, optionally substituted with one or more C₁₋₄ aliphatic group. In some embodiments, the present disclosure pertains to a composition comprising a biologically active agent and a lipid comprising a C₁₀-C₄₀ linear, saturated or partially unsaturated, aliphatic chain. In some embodiments, the present disclosure pertains to a composition comprising a biologically active agent and a lipid comprising a C₁₀-C₄₀ linear, saturated or partially unsaturated, aliphatic chain, optionally substituted with one or more C₁₋₄ aliphatic group. In some embodiments, a lipid includes, without limitation, lauric acid, myristic acid, palmitic acid, stearic acid, oleic acid, linoleic acid, alpha-linolenic acid, gamma-linolenic acid, docosahexaenoic acid (cis-DHA), turbinaric acid and dilinoleyl. In some embodiments, a lipid includes, without limitation: an amino lipid; an amphipathic lipid; an anionic lipid; an apolipoprotein; a cationic lipid; a low molecular weight cationic lipid; a cationic lipid such as CLinDMA and DLinDMA; an ionizable cationic lipid; a cloaking component; a helper lipid; a lipopeptide; a neutral lipid; a neutral zwitterionic lipid; a hydrophobic small molecule; a hydrophobic vitamin; a PEG-lipid; an uncharged lipid modified with one or more hydrophilic polymers; phospholipid; a phospholipid such as 1,2-dioleoyl-sn-glycero-3-phosphoethanolamine; a stealth lipid; a sterol; a cholesterol; and a targeting lipid; and any other lipid described herein or reported in the art. In some embodiments, a composition comprises a lipid and a portion of another lipid capable of mediating at least one function of another lipid. In various embodiments, a composition of the present disclosure comprises any one or more of any lipid described herein or known in the art.

[0367] lncRNA: The terms “Long non-coding RNA” and “lncRNA”, as used herein, refer to non-protein coding RNA transcripts longer than about 200 nucleotides. This numerical limit distinguishes long ncRNAs from small regulatory RNAs such as microRNAs (miRNAs), short interfering RNAs (siRNAs), Piwi-interacting RNAs (piRNAs), small nucleolar RNAs (snoRNAs), and other short RNAs. In some embodiments, a lncRNA bears one or more signatures of mRNAs, including 5′ capping, splicing, and poly-adenylation, but has little or no open reading frame (ORF). In some embodiments, a lncRNA is Air or Xist. In some embodiments, a lncRNA functions in regulating expression of another gene. In some embodiments, a lncRNA is a lncRNA listed in any lncRNA database, including, but not limited to: ChIPBase, C-It-Loci, LNCipedia, lncRNABase, lncRNAdb, lncRNome, MONOCLdb, NONCODE, and NRED. In some embodiments, a composition comprises a lipid and a portion of a lncRNA capable of mediating at least one function of a lncRNA.

[0368] mRNA: The terms “Messenger RNA”, “mRNA” and the like, as used herein, refer to any of a large family of RNA molecules that convey genetic information from DNA to the ribosome, where they specify the amino acid sequence of the protein products of gene expression. In various embodiments, following transcription of primary transcript mRNA (known as pre-mRNA) by RNA polymerase, processed, mature mRNA is translated into a polymer of amino acids: a protein, as summarized in the central dogma of molecular biology. In some embodiments, the mRNA includes a modified mRNA or mmRNA. U.S. Pat. No. 9,220,792. In some embodiments, a mRNA encodes any of: an allergen, a blood component, a gene therapy product, a human tissue or cellular product used in transplantation, a vaccine, an antibody, a cytokine, a growth factor, an enzyme, a thrombolytic, or an immunomodulator. In some embodiments, a composition comprises a lipid and a portion of a mRNA capable of mediating at least one function of a mRNA.

[0369] Muscle: The term “muscle”, as used herein, refers to a type of tissue found in animals (including, without limitation, mammals, including humans); muscle tissue is a type of fibrous tissue that has the ability to contract, producing movement in or maintaining the position of parts of the body. A muscle cell or tissue includes any skeletal muscle cell or tissue, cardiac muscle cell or tissue, smooth muscle cell or tissue, and/or myoepithelial cell or tissue. In some embodiments, a muscle cell or tissue includes a heart muscle cell or tissue. In some embodiments, a muscle cell or tissue includes a thoracic diaphragm muscle cell or tissue. In some embodiments, a muscle cell or tissue is a skeletal muscle cell or tissue. In various embodiments, a muscle cell or tissue is selected from: abductor digiti minimi (foot), abductor digiti minimi (hand), abductor hallucis, abductor pollicis brevis, abductor pollicis longus, adductor brevis, adductor hallucis, adductor longus, adductor magnus, adductor pollicis, anconeus, articularis cubiti, articularis genu, aryepiglotticus, aryjordanicus, auricularis, biceps brachii, biceps femoris, brachialis, brachioradialis, buccinator, bulbospongiosus, constrictor of pharynx—inferior, constrictor of pharynx—middle, constrictor of pharynx—superior, coracobrachialis, corrugator supercilii, cremaster, cricothyroid, dartos, deep transverse perinei, deltoid, depressor anguli oris, depressor labii inferioris, thoracic diaphragm, digastric, digastric (anterior view), erector spinae—spinalis, erector spinae—iliocostalis, erector spinae—longissimus, extensor carpi radialis brevis, extensor carpi radialis longus, extensor carpi ulnaris, extensor digiti minimi (hand), extensor digitorum (hand), extensor digitorum brevis (foot), extensor digitorum longus (foot), extensor hallucis longus, extensor indicis, extensor pollicis brevis, extensor pollicis longus, external oblique abdominis, flexor carpi radialis, flexor carpi ulnaris, flexor digiti minimi brevis (foot), flexor digiti minimi brevis (hand), flexor digitorum brevis, flexor digitorum longus (foot), flexor digitorum profundus, flexor digitorum superficialis, flexor hallucis brevis, flexor hallucis longus, flexor pollicis brevis, flexor pollicis longus, frontalis, gastrocnemius, gemellus inferior, gemellus superior, genioglossus, geniohyoid, gluteus maximus, gluteus medius, gluteus minimus, gracilis, hyoglossus, iliacus, inferior oblique, inferior rectus, infraspinatus, intercostals external, intercostals innermost, intercostals internal, internal oblique abdominis, interossei—dorsal of hand, interossei—dorsal of foot, interossei—palmar of hand, interossei—plantar of foot, interspinales, intertransversarii, intrinsic muscles of tongue, ishiocavernosus, lateral cricoarytenoid, lateral pterygoid, lateral rectus, latissimus dorsi, levator anguli oris, levator ani—coccygeus, levator ani—iliococcygeus, levator ani—pubococcygeus, levator ani—puborectalis, levator ani—pubovaginalis, levator labii superioris, levator labii superioris, alaeque nasi, levator palpebrae superioris, levator scapulae, levator veli palatini, levatores costarum, longus capitis, longus colli, lumbricals of foot (4), lumbricals of hand, masseter, medial pterygoid, medial rectus, mentalis, m. uvulae, mylohyoid, nasalis, oblique arytenoid, obliquus capitis inferior, obliquus capitis superior, obturator externus, obturator internus (A), obturator internus (B), omohyoid, opponens digiti minimi (hand), opponens pollicis, orbicularis oculi, orbicularis oris, palatoglossus, palatopharyngeus, palmaris brevis, palmaris longus, pectineus, pectoralis major, pectoralis minor, peroneus brevis, peroneus longus, peroneus tertius, piriformis (A), piriformis (B), plantaris, platysma, popliteus, posterior cricoarytenoid, procerus, pronator quadratus, pronator teres, psoas major, psoas minor, pyramidalis, quadratus femoris, quadratus lumborum, quadratus plantae, rectus abdominis, rectus capitus anterior, rectus capitus lateralis, rectus capitus posterior major, rectus capitus posterior minor, rectus femoris, rhomboid major, rhomboid minor, risorius, salpingopharyngeus, sartorius, scalenus anterior, scalenus medius, scalenus minimus, scalenus posterior, semimembranosus, semitendinosus, serratus anterior, serratus posterior inferior, serratus posterior superior, soleus, sphincter ani, sphincter urethrae, splenius capitis, splenius cervicis, stapedius, sternocleidomastoid, sternohyoid, sternothyroid, styloglossus, stylohyoid, stylohyoid (anterior view), stylopharyngeus, subclavius, subcostalis, subscapularis, superficial transverse, perinei, superior oblique, superior rectus, supinator, supraspinatus, temporalis, temporoparietalis, tensor fasciae lata, tensor tympani, tensor veli palatini, teres major, teres minor, thyro-arytenoid & vocalis, thyro-epiglotticus, thyrohyoid, tibialis anterior, tibialis posterior, transverse arytenoid, transversospinalis—multifidus, transversospinalis—rotatores, transversospinalis—semispinalis, transversus abdominis, transversus thoracis, trapezius, triceps, vastus intermedius, vastus lateralis, vastus medialis, zygomaticus major, and zygomaticus minor. In some embodiments, the muscle cell or tissue is a smooth muscle cell or tissue. In various embodiments, the muscle cell or tissue is selected from a muscle cell or tissue found in any of: esophagus, stomach, intestines, bronchi, uterus, urethra, bladder, blood vessels, and the arrector pili in the skin. In various embodiments, a muscle cell or tissues includes any structure or sub-structure which is a part of a muscle, including, but not limited to: epimysium, myocyte, sarcomere, tendon, fascile, muscle fiber, perimysium, collagen, collagen fiber, muscle spindle, sarcolemma, sarcoplasmic reticulum, thin filament, thick filament, Z disc, H zone, I band, A band or M line. In some embodiments, the muscle cell or tissue is healthy. In some embodiments, the muscle cell or tissue is afflicted with a disorder or disease.

[0370] Muscle-related disorder and the like: The terms “muscle-related disorder”, “muscle-related disease” and the like, as used herein, refers to a disease or disorder associated with a muscle cell or tissue, or neuromuscular system, including a skeletal muscle cell or tissue, cardiac muscle cell or tissue, smooth muscle cell or tissue, or myoepithelial cell or tissue, or other muscle cell or tissue. In various embodiments, the present disclosure pertains to a method pertaining to a composition comprising a lipid and a biologically active agent, wherein the composition is administered to a subject who is suffering from a muscle-related disorder. In various embodiments, a muscle-related disorder is sarcopenia, a muscle movement disorder, a muscle wasting-related disorder, muscle degeneration, muscle weakness, muscular dystrophy, Duchenne muscular dystrophy, heart failure, breathing disorder, skeletal muscle degeneration caused by malnutrition and disease, a muscle-related disease related to impaired insulin-dependent signaling, amyotrophic lateral sclerosis, spinal muscle atrophy and spinal cord injury, ischemic muscle disease. In some embodiments, a muscle related disorder includes, for example, shoulder stiffness, frozen shoulder (stiff shoulder due to age), rheumatoid arthritis, myofascitis, neck muscle rigidity, neck-shoulder-arm syndrome, whiplash syndrome, sprain, tendon sheath inflammation, low back pain syndrome, skeletal muscle atrophy and the like. In some embodiments, a muscle movement disorder includes a condition associated with one or more of bruxism, periodic limb movement disorder, restless leg syndrome, muscular dystrophy, muscle inflammation, pinched nerves, peripheral nerve damage, amyotrophic lateral sclerosis, myasthenia gravis, and disc herniation, sleep-related involuntary muscle movement disorder. In some embodiments, a muscle wasting-related disorder is a disease or condition that involves symptoms such as the gradual loss of muscle mass. In some embodiments, a muscle wasting is attributed to any of various causes, including genetic predispositions; age-related diseases such as hypertension, impaired glucose tolerance, diabetes, obesity, dyslipidemia, atherosclerosis, and cardiovascular diseases; chronic diseases such as cancers, autoimmune diseases, infectious diseases, AIDS, chronic inflammatory diseases, arthritis, malnutrition, renal diseases, chronic obstructive pulmonary disease, pulmonary emphysema, rachitis, chronic lower spine pain, peripheral nerve injury, central nerve injury, and chemical injury; conditions such as long-term immobilization, ineffectualness-like conditions such as bone fracture or trauma, and post-surgery bed rest; and the progressive decrease in skeletal muscle mass and strength caused by aging processes. The muscle wasting-related disease can cause weakened physical conditions, which can deteriorate health conditions and induce incapable physical activity. In some embodiments, sarcopenia is the gradual decrease in skeletal muscle mass caused by aging, which can directly cause a decrease in muscle strength, resulting in a decrease and impairment in various physical functions. In some embodiments, a muscular dystrophy is a disorder in which strength and muscle bulk gradually decline. Non-limiting examples of muscular dystrophy diseases includes Becker muscular dystrophy, tibial muscular dystrophy, Duchenne muscular dystrophy, Emery-Dreifuss muscular dystrophy, facioscapulohumeral muscular dystrophy, sarcoglycanopathies, congenital muscular dystrophy such as congenital muscular dystrophy due to partial LAMA2 deficiency, merosin-deficient congenital muscular dystrophy, type 1D congenital muscular dystrophy, Fukuyama congenital muscular dystrophy, limb-girdle type 1A muscular dystrophy, limb-girdle type 2A muscular dystrophy, limb-girdle type 2B muscular dystrophy, limb-girdle type 2C muscular dystrophy, limb-girdle type 2D muscular dystrophy, limb-girdle type 2E muscular dystrophy, limb-girdle type 2F muscular dystrophy, limb-girdle type 2G muscular dystrophy, limb-girdle type 2H muscular dystrophy, limb-girdle type 21 muscular dystrophy, limb-girdle type 21 muscular dystrophy, limb-girdle type 2J muscular dystrophy, limb-girdle type 2K muscular dystrophy, limb-girdle type IC muscular dystrophy, rigid spine muscular dystrophy with epidermolysis bullosa simplex, oculopharyngeal muscular dystrophy, Ullrich congenital muscular dystrophy, and Ullrich scleroatonic muscular dystrophy. In some embodiments, a subject has Duchenne muscular dystrophy. In some embodiments, a muscle degeneration is caused by an injury, by a degenerative muscle disease or disorder, or by a disease, disorder or damage to the nervous system which results in denervation of muscle. Such diseases or disorders include, but are not limited to, degenerative or inflammatory muscle diseases such as muscular dystrophy, myotonic dystrophy, fascio-scapulo-humoral dystrophy, limb girdle dystrophy, distal muscular dystrophy or myositis or peripheral neuropathies associated with diabetic neuropathy, acute neurapraxia, neurotmesis or axotmesis. In addition, the methods described herein can be used to diagnose or monitor neurological degenerative diseases, especially those associated with degeneration of motor neurons, such as amylotrophic laterial sclerosis, spinal muscular atrophy, post-polio syndrome, infantile muscular atrophy, poliomyelitis or Charlot-Marie Tooth disease or inflammatory or demyelinating neurological diseases or disorders such as Guillan-Barre Syndrome or chronic inflammatory demyelinating polyneuropathy. The methods of the present invention may also be used to diagnose or monitor degeneration caused by nerve injuries such as those associated with carpal tunnel syndrome, compression, mechanical severance of a nerve or a tumor. In addition, the methods disclosed herein may be utilized to diagnose neural or non-neuronal tumors.

[0371] ncRNA: The term “ncRNA”, as used herein, refers to non-coding RNA, of which there are several types, including, but not limited to lncRNA (long non-coding RNA). In some embodiments, a ncRNA participates in regulating the expression of a gene or protein or gene product. Wahlestedt 2013 Nat. Rev. Drug Disc. 12: 433-446. Antagonists to ncRNAs have been reported. Meng et al. 2015 Nature 518: 409-412; and Ling et al. 2013 Nature Rev. Drug Discov. 12: 847-865. In some embodiments, a composition comprises a biologically active agent and a lipid, wherein the biologically active agent is a nucleic acid or other antagonist to a ncRNA. In some embodiments, a composition comprises a lipid and a portion of a ncRNA capable of mediating at least one function of a ncRNA.

[0372] Optionally Substituted: As described herein, compounds, e.g., oligonucleotides, of the disclosure may contain optionally substituted and/or substituted moieties. In general, the term “substituted,” whether preceded by the term “optionally” or not, means that one or more hydrogens of the designated moiety are replaced with a suitable substituent. Unless otherwise indicated, an “optionally substituted” group may have a suitable substituent at each substitutable position of the group, and when more than one position in any given structure may be substituted with more than one substituent selected from a specified group, the substituent may be either the same or different at every position. In some embodiments, an optionally substituted group is unsubstituted. Combinations of substituents envisioned by this disclosure are preferably those that result in the formation of stable or chemically feasible compounds. The term “stable,” as used herein, refers to compounds that are not substantially altered when subjected to conditions to allow for their production, detection, and, in certain embodiments, their recovery, purification, and use for one or more of the purposes disclosed herein.

[0373] Suitable monovalent substituents include halogen; —(CH₂)₀₋₄R^{∘}; —(CH₂)₀₋₄OR^{∘}; —O(CH₂)₀₋₄R^{∘}, —O—(CH₂)₀₋₄C(O)OR^{∘}; —(CH₂)₀₋₄CH(OR^{∘})₂; —(CH₂)₀₋₄Ph, which may be substituted with R^{∘}; —(CH₂)₀₋₄O(CH₂)₀₋₁Ph which may be substituted with R^{∘}; —CH═CHPh, which may be substituted with R^{∘}; —(CH₂)₀₋₄O(CH₂)₀₋₁-pyridyl which may be substituted with R^{∘}; —NO₂; —CN; —N₃; —(CH₂)₀₋₄N(R^{∘})₂; —(CH₂)₀₋₄N(R^{∘})C(O)R^{∘}; —N(R^{∘})C(S)R^{∘}; —(CH₂)_{0- 4}N(R^{∘})C(O)NR^{∘}₂; —N(R^{∘})C(S)NR^{∘}₂; —(CH₂)₀₋₄N(R^{∘})C(O)OR^{∘}; —N(R^{∘})N(R^{∘})C(O)R^{∘}; —N(R^{∘})N(R^{∘})C(O)NR^{∘}₂; —N(R^{∘})N(R^{∘})C(O)OR^{∘}; —(CH₂)₀₋₄C(O)R^{∘}; —C(S)R^{∘}; —(CH₂)₀₋₄C(O)OR^{∘}; —(CH₂)₀₋₄C(O)SR^{∘}; —(CH₂)₀₋₄C(O)OSiR^{∘}₃; —(CH₂)₀₋₄OC(O)R^{∘}; —OC(O)(CH₂)₀₋₄SR, —SC(S)SR^{∘}; —(CH₂)₀₋₄SC(O)R^{∘}; —(CH₂)₀₋₄C(O)NR^{∘}₂; —C(S)NR^{∘}₂; —C(S)SR^{∘}; —SC(S)SR^{∘}, —(CH₂)₀₋₄OC(O)NR^{∘}₂; —C(O)N(OR^{∘})R^{∘}; —C(O)C(O)R^{∘}; —C(O)CH₂C(O)R^{∘}; —C(NOR^{∘})R^{∘}; —(CH₂)₀₋₄SSR^{∘}; —(CH₂)₀₋₄S(O)₂R^{∘}; —(CH₂)₀₋₄S(O)₂OR^{∘}; —(CH₂)₀₋₄OS(O)₂R^{∘}; —S(O)₂NR^{∘}₂; —(CH₂)₀₋₄S(O)R^{∘}; —N(R^{∘})S(O)₂NR^{∘}₂; —N(R^{∘})S(O)₂R^{∘}; —N(OR^{∘})R^{∘}; —C(NH)NR^{∘}₂; —P(O)₂R^{∘}; —P(O)R^{∘}₂; —OP(O)R^{∘}₂; —OP(O)(OR^{∘})₂; —SiR^{∘}₃; —OSiR^{∘}₃; —(C₁₋₄ straight or branched alkylene)O—N(R^{∘})₂; or —(C₁₋₄ straight or branched alkylene)C(O)O—N(R^{∘})₂, wherein each R^{∘} may be substituted as defined below and is independently hydrogen, C₁₋₂₀ aliphatic, C₁₋₂₀ heteroaliphatic having 1-5 heteroatoms independently selected from nitrogen, oxygen, sulfur, silicon and phosphorus, —CH₂—(C₆₋₁₄ aryl), —O(CH₂)₀₋₁(C₆₋₁₄ aryl), —CH₂-(5-14 membered heteroaryl ring), a 5-20 membered, monocyclic, bicyclic, or polycyclic, saturated, partially unsaturated or aryl ring having 0-5 heteroatoms independently selected from nitrogen, oxygen, sulfur, silicon and phosphorus, or, notwithstanding the definition above, two independent occurrences of R^{∘}, taken together with their intervening atom(s), form a 5-20 membered, monocyclic, bicyclic, or polycyclic, saturated, partially unsaturated or aryl ring having 0-5 heteroatoms independently selected from nitrogen, oxygen, sulfur, silicon and phosphorus, which may be substituted as defined below.

[0374] Suitable monovalent substituents on R^{∘} (or the ring formed by taking two independent occurrences of R^{∘} together with their intervening atoms), are independently halogen, —(CH₂)₀₋₂R^{●}, -(haloR^{●}), —(CH₂)₀₋₂OH, —(CH₂)₀₋₂OR^{●}, —(CH₂)₀₋₂CH(OR^{●})₂; —O(haloR^{●}), —CN, —N₃, —(CH₂)₀₋₂C(O)R^{●}, —(CH₂)₀₋₂C(O)OH, —(CH₂)₀₋₂C(O)OR^{●}, —(CH₂)₀₋₂SR^{●}, —(CH₂)₀₋₂SH, —(CH₂)₀₋₂NH₂, —(CH₂)₀₋₂NHR^{●}, —(CH₂)₀₋₂NR^{●}₂, —NO₂, —SiR^{●}₃, —OSiR^{●}₃, —C(O)SR^{●}, —(C₁₋₄ straight or branched alkylene)C(O)OR^{●}, or —SSR^{●} wherein each R^{●} is unsubstituted or where preceded by “halo” is substituted only with one or more halogens, and is independently selected from C₁₋₄ aliphatic, —CH₂Ph, —O(CH₂)₀₋₁Ph, or a 5-6-membered saturated, partially unsaturated, or aryl ring having 0-4 heteroatoms independently selected from nitrogen, oxygen, and sulfur. Suitable divalent substituents on a saturated carbon atom of R^{∘} include ═O and ═S.

[0375] Suitable divalent substituents include the following: ═O, ═S, ═NNR*₂, ═NNHC(O)R*, ═NNHC(O)OR*, ═NNHS(O)₂R*, ═NR*, ═NOR*, —O(C(R*₂))₂₋₃O—, or —S(C(R*₂))₂₋₃S—, wherein each independent occurrence of R* is selected from hydrogen, C₁₋₆ aliphatic which may be substituted as defined below, or an unsubstituted 5-6-membered saturated, partially unsaturated, or aryl ring having 0-4 heteroatoms independently selected from nitrogen, oxygen, and sulfur. Suitable divalent substituents that are bound to vicinal substitutable carbons of an “optionally substituted” group include: —O(CR*₂)₂₋₃O—, wherein each independent occurrence of R* is selected from hydrogen, C₁₋₆ aliphatic which may be substituted as defined below, or an unsubstituted 5-6-membered saturated, partially unsaturated, or aryl ring having 0-4 heteroatoms independently selected from nitrogen, oxygen, and sulfur.

[0376] Suitable substituents on the aliphatic group of R* include halogen, —R^{●}, -(haloR^{●}), —OH, —OR^{●}, —O(haloR^{●}), —CN, —C(O)OH, —C(O)OR^{●}, —NH₂, —NHR^{●}, —NR^{●}₂, or —NO₂, wherein each R^{●} is unsubstituted or where preceded by “halo” is substituted only with one or more halogens, and is independently C₁₋₄ aliphatic, —CH₂Ph, —O(CH₂)₀₋₁Ph, or a 5-6-membered saturated, partially unsaturated, or aryl ring having 0-4 heteroatoms independently selected from nitrogen, oxygen, and sulfur.

[0377] In some embodiments, suitable substituents on a substitutable nitrogen include —R^{†}, —NR^{†}₂, —C(O)R^{†}, —C(O)OR^{†}, —C(O)C(O)R^{†}, —C(O)CH₂C(O)R^{†}, —S(O)₂R^{†}, —S(O)₂NR^{†}₂, —C(S)NR^{†}₂, —C(NH)NR^{†}₂, or —N(R^{†})S(O)₂R^{†}; wherein each R^{†} is independently hydrogen, C₁₋₆ aliphatic which may be substituted as defined below, unsubstituted —OPh, or an unsubstituted 5-6-membered saturated, partially unsaturated, or aryl ring having 0-4 heteroatoms independently selected from nitrogen, oxygen, and sulfur, or, notwithstanding the definition above, two independent occurrences of R, taken together with their intervening atom(s) form an unsubstituted 3-12-membered saturated, partially unsaturated, or aryl mono- or bicyclic ring having 0-4 heteroatoms independently selected from nitrogen, oxygen, and sulfur.

[0378] Suitable substituents on the aliphatic group of R are independently halogen, —R^{●}, -(haloR^{●}), —OH, —OR^{●}, —O(haloR^{●}), —CN, —C(O)OH, —C(O)OR^{●}, —NH₂, —NHR^{●}, —NR^{●}₂, or —NO₂, wherein each R^{●} is unsubstituted or where preceded by “halo” is substituted only with one or more halogens, and is independently C₁₋₄ aliphatic, —CH₂Ph, —O(CH₂)₀₋₁Ph, or a 5-6-membered saturated, partially unsaturated, or aryl ring having 0-4 heteroatoms independently selected from nitrogen, oxygen, and sulfur.

[0379] Oral: The phrases “oral administration” and “administered orally” as used herein have their art-understood meaning referring to administration by mouth of a compound or composition.

[0380] Parenteral: The phrases “parenteral administration” and “administered parenterally” as used herein have their art-understood meaning referring to modes of administration other than enteral and topical administration, usually by injection, and include, without limitation, intravenous, intramuscular, intraarterial, intrathecal, intracapsular, intraorbital, intracardiac, intradermal, intraperitoneal, transtracheal, subcutaneous, subcuticular, intraarticulare, subcapsular, subarachnoid, intraspinal, and intrasternal injection and infusion.

[0381] Partially unsaturated: As used herein, the term “partially unsaturated” refers to a moiety that includes at least one double or triple bond. The term “partially unsaturated” is intended to encompass groups having multiple sites of unsaturation, but is not intended to include aryl or heteroaryl moieties.

[0382] Peptide: The term “peptide”, as used herein, refers to a molecule comprising a plurality of amino acids joined together via peptide bonds. In some embodiments, a peptide includes a dipeptide, tripeptide, oligopeptide and polypeptide. In some embodiments, a dipeptide contains two amino acids; a tripeptide contains three amino acids; and an oligopeptide comprises about 2 to about 50 or more amino acids. In some embodiments, peptides comprise more than about 50 amino acids. In some embodiments, a polypeptide and a protein are also molecules comprising a plurality of amino acids joined together via peptide bonds. In some embodiments, a peptide includes any therapeutic peptide listed in the SATPdb database of therapeutic peptides. Singh et al. 2015 Nucl. Acids Res. doi: 10.1093/nar/gkv1114. In some embodiments, a composition comprises a lipid and a portion of a peptide capable of mediating at least one function of a peptide.

[0383] Pharmaceutical composition: As used herein, the term “pharmaceutical composition” refers to an active agent, formulated together with one or more pharmaceutically acceptable carriers. In some embodiments, active agent is present in unit dose amount appropriate for administration in a therapeutic regimen that shows a statistically significant probability of achieving a predetermined therapeutic effect when administered to a relevant population. In some embodiments, pharmaceutical compositions may be specially formulated for administration in solid or liquid form, including those adapted for the following: oral administration, for example, drenches (aqueous or non-aqueous solutions or suspensions), tablets, e.g., those targeted for buccal, sublingual, and systemic absorption, boluses, powders, granules, pastes for application to the tongue; parenteral administration, for example, by subcutaneous, intramuscular, intravenous or epidural injection as, for example, a sterile solution or suspension, or sustained-release formulation; topical application, for example, as a cream, ointment, or a controlled-release patch or spray applied to the skin, lungs, or oral cavity; intravaginally or intrarectally, for example, as a pessary, cream, or foam; sublingually; ocularly; transdermally; or nasally, pulmonary, and to other mucosal surfaces.

[0384] Pharmaceutically acceptable: As used herein, the phrase “pharmaceutically acceptable” refers to those compounds, materials, compositions, and/or dosage forms which are, within the scope of sound medical judgment, suitable for use in contact with the tissues of human beings and animals without excessive toxicity, irritation, allergic response, or other problem or complication, commensurate with a reasonable benefit/risk ratio.

[0385] Pharmaceutically acceptable carrier: As used herein, the term “pharmaceutically acceptable carrier” means a pharmaceutically-acceptable material, composition or vehicle, such as a liquid or solid filler, diluent, excipient, or solvent encapsulating material, involved in carrying or transporting the subject compound from one organ, or portion of the body, to another organ, or portion of the body. Each carrier must be “acceptable” in the sense of being compatible with the other ingredients of the formulation and not injurious to the patient. Some examples of materials which can serve as pharmaceutically-acceptable carriers include: sugars, such as lactose, glucose and sucrose; starches, such as corn starch and potato starch; cellulose, and its derivatives, such as sodium carboxymethyl cellulose, ethyl cellulose and cellulose acetate; powdered tragacanth; malt; gelatin; talc; excipients, such as cocoa butter and suppository waxes; oils, such as peanut oil, cottonseed oil, safflower oil, sesame oil, olive oil, corn oil and soybean oil; glycols, such as propylene glycol; polyols, such as glycerin, sorbitol, mannitol and polyethylene glycol; esters, such as ethyl oleate and ethyl laurate; agar; buffering agents, such as magnesium hydroxide and aluminum hydroxide; alginic acid; pyrogen-free water; isotonic saline; Ringer's solution; ethyl alcohol; pH buffered solutions; polyesters, polycarbonates and/or polyanhydrides; and other non-toxic compatible substances employed in pharmaceutical formulations.

[0386] Pharmaceutically acceptable salt: The term “pharmaceutically acceptable salt”, as used herein, refers to salts of such compounds that are appropriate for use in pharmaceutical contexts, i.e., salts which are, within the scope of sound medical judgment, suitable for use in contact with the tissues of humans and lower animals without undue toxicity, irritation, allergic response and the like, and are commensurate with a reasonable benefit/risk ratio. Pharmaceutically acceptable salts are well known in the art. For example, S. M. Berge, et al. describes pharmaceutically acceptable salts in detail in J. Pharmaceutical Sciences, 66: 1-19 (1977). In some embodiments, pharmaceutically acceptable salt include, but are not limited to, nontoxic acid addition salts, which are salts of an amino group formed with inorganic acids such as hydrochloric acid, hydrobromic acid, phosphoric acid, sulfuric acid and perchloric acid or with organic acids such as acetic acid, maleic acid, tartaric acid, citric acid, succinic acid or malonic acid or by using other methods used in the art such as ion exchange. In some embodiments, pharmaceutically acceptable salts include, but are not limited to, adipate, alginate, ascorbate, aspartate, benzenesulfonate, benzoate, bisulfate, borate, butyrate, camphorate, camphorsulfonate, citrate, cyclopentanepropionate, digluconate, dodecylsulfate, ethanesulfonate, formate, fumarate, glucoheptonate, glycerophosphate, gluconate, hemisulfate, heptanoate, hexanoate, hydroiodide, 2-hydroxy-ethanesulfonate, lactobionate, lactate, laurate, lauryl sulfate, malate, maleate, malonate, methanesulfonate, 2-naphthalenesulfonate, nicotinate, nitrate, oleate, oxalate, palmitate, pamoate, pectinate, persulfate, 3-phenylpropionate, phosphate, picrate, pivalate, propionate, stearate, succinate, sulfate, tartrate, thiocyanate, p-toluenesulfonate, undecanoate, valerate salts, and the like. Representative alkali or alkaline earth metal salts include sodium, lithium, potassium, calcium, magnesium, and the like. In some embodiments, pharmaceutically acceptable salts include, when appropriate, nontoxic ammonium, quaternary ammonium, and amine cations formed using counterions such as halide, hydroxide, carboxylate, sulfate, phosphate, nitrate, alkyl having from 1 to 6 carbon atoms, sulfonate and aryl sulfonate.

[0387] Plasmid: The term “plasmid”, as used herein, refers to an extra-chromosomal (apart from a chromosome) length of DNA; plasmids are generally circular and generally capable of independent replication, though exceptions exist such as linear plasmids and plasmids which are not capable of independent replication (including, but not limited to, suicide vectors). In some embodiments, a plasmid can be extra-chromosomal under some conditions (e.g., in a laboratory), but capable of integrating into a chromosome (e.g., acting as a suicide vector capable of integrating into a chromosome in a cell or subject). Plasmids naturally exist in many organisms, including bacteria and some eukaryotic organisms, and are commonly engineered and produced artificially to carry genes into an organism. A plasmid is generally double-stranded, or can alternatively be single-stranded or partially single- and double-stranded, or have other strandedness. Artificial plasmids are commonly used in genetic engineering. Plasmids include plasmids encoding or capable of expressing a nucleic acid, including, without limitation, a mRNA, a RNAi agent or precursor thereof, an antagonist to another nucleic acid (including, without limitation, an antagonist to a miRNA, RNAi agent, mRNA, etc.) or precursor thereof, or other nucleic acids of therapeutic benefit. Additional parts of a plasmid can optionally include one or more copies of any one or more component selected from: a gene encoding a protein related to replication, an origin or replication, a gene encoding a replication initiator protein, an origin of replication enhancer, a gene encoding a nucleic acid of therapeutic benefit (or a precursor thereof), one or multiple promoters, one or multiple transcription enhancers, one or multiple transcription terminators, one or more marker genes (e.g., a gene encoding resistance to an antibiotic or encoding an enzyme required for survival and/or growth under certain laboratory conditions). In some embodiments, a plasmid is a suicide vector, which can lack any of: an origin of replication, a gene encoding a DNA replication initiator protein, or any other component required for independent replication. In some embodiments, two plasmids can be physically separate, but produce products which work in concert; for example, one plasmid can encode a gene for a transcriptional enhancer which enhances transcription of a gene encoded on another plasmid; for another example, one plasmid can comprise a gene encoding a DNA replication initiator protein which initiates replication at a DNA replication origin on another plasmid. Various plasmids are known in the art. In some embodiments, a composition comprises a lipid and a portion of a plasmid capable of mediating at least one function of a plasmid.

[0388] Protecting group: The term “protecting group,” as used herein, is well known in the art and includes those described in detail in Protecting Groups in Organic Synthesis, T. W. Greene and P. G. M. Wuts, 3^{rd} edition, John Wiley & Sons, 1999, the entirety of which is incorporated herein by reference. Also included are those protecting groups specially adapted for nucleoside and nucleotide chemistry described in Current Protocols in Nucleic Acid Chemistry, edited by Serge L. Beaucage et al. 06/2012, the entirety of Chapter 2 is incorporated herein by reference. Suitable amino-protecting groups include methyl carbamate, ethyl carbamante, 9-fluorenylmethyl carbamate (Fmoc), 9-(2-sulfo)fluorenylmethyl carbamate, 9-(2,7-dibromo)fluoroenylmethyl carbamate, 2,7-di-t-butyl-[9-(10,10-dioxo-10,10,10,10-tetrahydrothioxanthyl)]methyl carbamate (DBD-Tmoc), 4-methoxyphenacyl carbamate (Phenoc), 2,2,2-trichloroethyl carbamate (Troc), 2-trimethylsilylethyl carbamate (Teoc), 2-phenylethyl carbamate (hZ), 1-(1-adamantyl)-1-methylethyl carbamate (Adpoc), 1,1-dimethyl-2-haloethyl carbamate, 1,1-dimethyl-2,2-dibromoethyl carbamate (DB-t-BOC), 1,1-dimethyl-2,2,2-trichloroethyl carbamate (TCBOC), 1-methyl-1-(4-biphenylyl)ethyl carbamate (Bpoc), 1-(3,5-di-t-butylphenyl)-1-methylethyl carbamate (t-Bumeoc), 2-(2′- and 4′-pyridyl)ethyl carbamate (Pyoc), 2-(N,N-dicyclohexylcarboxamido)ethyl carbamate, t-butyl carbamate (BOC), 1-adamantyl carbamate (Adoc), vinyl carbamate (Voc), allyl carbamate (Alloc), 1-isopropylallyl carbamate (Ipaoc), cinnamyl carbamate (Coc), 4-nitrocinnamyl carbamate (Noc), 8-quinolyl carbamate, N-hydroxypiperidinyl carbamate, alkyldithio carbamate, benzyl carbamate (Cbz), p-methoxybenzyl carbamate (Moz), p-nitobenzyl carbamate, p-bromobenzyl carbamate, p-chlorobenzyl carbamate, 2,4-dichlorobenzyl carbamate, 4-methylsulfinylbenzyl carbamate (Msz), 9-anthrylmethyl carbamate, diphenylmethyl carbamate, 2-methylthioethyl carbamate, 2-methylsulfonylethyl carbamate, 2-(p-toluenesulfonyl)ethyl carbamate, [2-(1,3-dithianyl)]methyl carbamate (Dmoc), 4-methylthiophenyl carbamate (Mtpc), 2,4-dimethylthiophenyl carbamate (Bmpc), 2-phosphonioethyl carbamate (Peoc), 2-triphenylphosphonioisopropyl carbamate (Ppoc), 1,1-dimethyl-2-cyanoethyl carbamate, m-chloro-p-acyloxybenzyl carbamate, p-(dihydroxyboryl)benzyl carbamate, 5-benzisoxazolylmethyl carbamate, 2-(trifluoromethyl)-6-chromonylmethyl carbamate (Tcroc), m-nitrophenyl carbamate, 3,5-dimethoxybenzyl carbamate, o-nitrobenzyl carbamate, 3,4-dimethoxy-6-nitrobenzyl carbamate, phenyl(o-nitrophenyl)methyl carbamate, phenothiazinyl-(10)-carbonyl derivative, N′-p-toluenesulfonylaminocarbonyl derivative, N′-phenylaminothiocarbonyl derivative, t-amyl carbamate, S-benzyl thiocarbamate, p-cyanobenzyl carbamate, cyclobutyl carbamate, cyclohexyl carbamate, cyclopentyl carbamate, cyclopropylmethyl carbamate, p-decyloxybenzyl carbamate, 2,2-dimethoxycarbonylvinyl carbamate, o-(N,N-dimethylcarboxamido)benzyl carbamate, 1,1-dimethyl-3-(N,N-dimethylcarboxamido)propyl carbamate, 1,1-dimethylpropynyl carbamate, di(2-pyridyl)methyl carbamate, 2-furanylmethyl carbamate, 2-iodoethyl carbamate, isoborynl carbamate, isobutyl carbamate, isonicotinyl carbamate, p-(p′-methoxyphenylazo)benzyl carbamate, 1-methylcyclobutyl carbamate, 1-methylcyclohexyl carbamate, 1-methyl-1-cyclopropylmethyl carbamate, 1-methyl-1-(3,5-dimethoxyphenyl)ethyl carbamate, 1-methyl-1-(p-phenylazophenyl)ethyl carbamate, 1-methyl-1-phenylethyl carbamate, 1-methyl-1-(4-pyridyl)ethyl carbamate, phenyl carbamate, p-(phenylazo)benzyl carbamate, 2,4,6-tri-t-butylphenyl carbamate, 4-(trimethylammonium)benzyl carbamate, 2,4,6-trimethylbenzyl carbamate, formamide, acetamide, chloroacetamide, trichloroacetamide, trifluoroacetamide, phenylacetamide, 3-phenylpropanamide, picolinamide, 3-pyridylcarboxamide, N-benzoylphenylalanyl derivative, benzamide, p-phenylbenzamide, o-nitophenylacetamide, o-nitrophenoxyacetamide, acetoacetamide, (N′-dithiobenzyloxycarbonylamino)acetamide, 3-(p-hydroxyphenyl)propanamide, 3-(o-nitrophenyl)propanamide, 2-methyl-2-(o-nitrophenoxy)propanamide, 2-methyl-2-(o-phenylazophenoxy)propanamide, 4-chlorobutanamide, 3-methyl-3-nitrobutanamide, o-nitrocinnamide, N-acetylmethionine derivative, o-nitrobenzamide, o-(benzoyloxymethyl)benzamide, 4,5-diphenyl-3-oxazolin-2-one, N-phthalimide, N-dithiasuccinimide (Dts), N-2,3-diphenylmaleimide, N-2,5-dimethylpyrrole, N-1,1,4,4-tetramethyldisilylazacyclopentane adduct (STABASE), 5-substituted 1,3-dimethyl-1,3,5-triazacyclohexan-2-one, 5-substituted 1,3-dibenzyl-1,3,5-triazacyclohexan-2-one, 1-substituted 3,5-dinitro-4-pyridone, N-methylamine, N-allylamine, N-[2-(trimethylsilyl)ethoxy]methylamine (SEM), N-3-acetoxypropylamine, N-(1-isopropyl-4-nitro-2-oxo-3-pyroolin-3-yl)amine, quaternary ammonium salts, N-benzylamine, N-di(4-methoxyphenyl)methylamine, N-5-dibenzosuberylamine, N-triphenylmethylamine (Tr), N-[(4-methoxyphenyl)diphenylmethyl]amine (MMTr), N-9-phenylfluorenylamine (PhF), N-2,7-dichloro-9-fluorenylmethyleneamine, N-ferrocenylmethylamino (Fcm), N-2-picolylamino N′-oxide, N-1,1-dimethylthiomethyleneamine, N-benzylideneamine, N-p-methoxybenzylideneamine, N-diphenylmethyleneamine, N-[(2-pyridyl)mesityl]methyleneamine, N—(N′,N′-dimethylaminomethylene)amine, N,N′-isopropylidenediamine, N-p-nitrobenzylideneamine, N-salicylideneamine, N-chlorosalicylideneamine, N-(5-chloro-2-hydroxyphenyl)phenylmethyleneamine, N-cyclohexylideneamine, N-(5,5-dimethyl-3-oxo-1-cyclohexenyl)amine, N-borane derivative, N-diphenylborinic acid derivative, N-[phenyl(pentacarbonylchromium- or tungsten)carbonyl]amine, N-copper chelate, N-zinc chelate, N-nitroamine, N-nitrosoamine, amine N-oxide, diphenylphosphinamide (Dpp), dimethylthiophosphinamide (Mpt), diphenylthiophosphinamide (Ppt), dialkyl phosphoramidates, dibenzyl phosphoramidate, diphenyl phosphoramidate, benzenesulfenamide, o-nitrobenzenesulfenamide (Nps), 2,4-dinitrobenzenesulfenamide, pentachlorobenzenesulfenamide, 2-nitro-4-methoxybenzenesulfenamide, triphenylmethylsulfenamide, 3-nitropyridinesulfenamide (Npys), p-toluenesulfonamide (Ts), benzenesulfonamide, 2,3,6-trimethyl-4-methoxybenzenesulfonamide (Mtr), 2,4,6-trimethoxybenzenesulfonamide (Mtb), 2,6-dimethyl-4-methoxybenzenesulfonamide (Pme), 2,3,5,6-tetramethyl-4-methoxybenzenesulfonamide (Mte), 4-methoxybenzenesulfonamide (Mbs), 2,4,6-trimethylbenzenesulfonamide (Mts), 2,6-dimethoxy-4-methylbenzenesulfonamide (iMds), 2,2,5,7,8-pentamethylchroman-6-sulfonamide (Pmc), methanesulfonamide (Ms), β-trimethylsilylethanesulfonamide (SES), 9-anthracenesulfonamide, 4-(4′,8′-dimethoxynaphthylmethyl)benzenesulfonamide (DNMBS), benzylsulfonamide, trifluoromethylsulfonamide, and phenacylsulfonamide.

[0389] Suitably protected carboxylic acids further include, but are not limited to, silyl-, alkyl-, alkenyl-, aryl-, and arylalkyl-protected carboxylic acids. Examples of suitable silyl groups include trimethylsilyl, triethylsilyl, t-butyldimethylsilyl, t-butyldiphenylsilyl, triisopropylsilyl, and the like. Examples of suitable alkyl groups include methyl, benzyl, p-methoxybenzyl, 3,4-dimethoxybenzyl, trityl, t-butyl, tetrahydropyran-2-yl. Examples of suitable alkenyl groups include allyl. Examples of suitable aryl groups include optionally substituted phenyl, biphenyl, or naphthyl. Examples of suitable arylalkyl groups include optionally substituted benzyl (e.g., p-methoxybenzyl (MPM), 3,4-dimethoxybenzyl, O— nitrobenzyl, p-nitrobenzyl, p-halobenzyl, 2,6-dichlorobenzyl, p-cyanobenzyl), and 2- and 4-picolyl.

[0390] Suitable hydroxyl protecting groups include methyl, methoxylmethyl (MOM), methylthiomethyl (MTM), t-butylthiomethyl, (phenyldimethylsilyl)methoxymethyl (SMOM), benzyloxymethyl (BOM), p-methoxybenzyloxymethyl (PMBM), (4-methoxyphenoxy)methyl (p-AOM), guaiacolmethyl (GUM), t-butoxymethyl, 4-pentenyloxymethyl (POM), siloxymethyl, 2-methoxyethoxymethyl (MEM), 2,2,2-trichloroethoxymethyl, bis(2-chloroethoxy)methyl, 2-(trimethylsilyl)ethoxymethyl (SEMOR), tetrahydropyranyl (THP), 3-bromotetrahydropyranyl, tetrahydrothiopyranyl, 1-methoxycyclohexyl, 4-methoxytetrahydropyranyl (MTHP), 4-methoxytetrahydrothiopyranyl, 4-methoxytetrahydrothiopyranyl S,S-dioxide, 1-[(2-chloro-4-methyl)phenyl]-4-methoxypiperidin-4-yl (CTMP), 1,4-dioxan-2-yl, tetrahydrofuranyl, tetrahydrothiofuranyl, 2,3,3a,4,5,6,7,7a-octahydro-7,8,8-trimethyl-4,7-methanobenzofuran-2-yl, 1-ethoxyethyl, 1-(2-chloroethoxy)ethyl, 1-methyl-1-methoxyethyl, 1-methyl-1-benzyloxyethyl, 1-methyl-1-benzyloxy-2-fluoroethyl, 2,2,2-trichloroethyl, 2-trimethylsilylethyl, 2-(phenylselenyl)ethyl, t-butyl, allyl, p-chlorophenyl, p-methoxyphenyl, 2,4-dinitrophenyl, benzyl, p-methoxybenzyl, 3,4-dimethoxybenzyl, o-nitrobenzyl, p-nitrobenzyl, p-halobenzyl, 2,6-dichlorobenzyl, p-cyanobenzyl, p-phenylbenzyl, 2-picolyl, 4-picolyl, 3-methyl-2-picolyl N-oxido, diphenylmethyl, p,p′-dinitrobenzhydryl, 5-dibenzosuberyl, triphenylmethyl, α-naphthyldiphenylmethyl, p-methoxyphenyldiphenylmethyl, di(p-methoxyphenyl)phenylmethyl, tri(p-methoxyphenyl)methyl, 4-(4′-bromophenacyloxyphenyl)diphenylmethyl, 4,4′,4″-tris(4,5-dichlorophthalimidophenyl)methyl, 4,4′,4″-tris(levulinoyloxyphenyl)methyl, 4,4′,4″-tris(benzoyloxyphenyl)methyl, 3-(imidazol-1-yl)bis(4′,4″-dimethoxyphenyl)methyl, 1,1-bis(4-methoxyphenyl)-1′-pyrenylmethyl, 9-anthryl, 9-(9-phenyl)xanthenyl, 9-(9-phenyl-10-oxo)anthryl, 1,3-benzodithiolan-2-yl, benzisothiazolyl S,S-dioxido, trimethylsilyl (TMS), triethylsilyl (TES), triisopropylsilyl (TIPS), dimethylisopropylsilyl (IPDMS), diethylisopropylsilyl (DEIPS), dimethylthexylsilyl, t-butyldimethylsilyl (TBDMS), t-butyldiphenylsilyl (TBDPS), tribenzylsilyl, tri-p-xylylsilyl, triphenylsilyl, diphenylmethylsilyl (DPMS), t-butylmethoxyphenylsilyl (TBMPS), formate, benzoylformate, acetate, chloroacetate, dichloroacetate, trichloroacetate, trifluoroacetate, methoxyacetate, triphenylmethoxyacetate, phenoxyacetate, p-chlorophenoxyacetate, 3-phenylpropionate, 4-oxopentanoate (levulinate), 4,4-(ethylenedithio)pentanoate (levulinoyldithioacetal), pivaloate, adamantoate, crotonate, 4-methoxycrotonate, benzoate, p-phenylbenzoate, 2,4,6-trimethylbenzoate (mesitoate), alkyl methyl carbonate, 9-fluorenylmethyl carbonate (Fmoc), alkyl ethyl carbonate, alkyl 2,2,2-trichloroethyl carbonate (Troc), 2-(trimethylsilyl)ethyl carbonate (TMSEC), 2-(phenylsulfonyl) ethyl carbonate (Psec), 2-(triphenylphosphonio) ethyl carbonate (Peoc), alkyl isobutyl carbonate, alkyl vinyl carbonate alkyl allyl carbonate, alkyl p-nitrophenyl carbonate, alkyl benzyl carbonate, alkyl p-methoxybenzyl carbonate, alkyl 3,4-dimethoxybenzyl carbonate, alkyl o-nitrobenzyl carbonate, alkyl p-nitrobenzyl carbonate, alkyl S-benzyl thiocarbonate, 4-ethoxy-1-napththyl carbonate, methyl dithiocarbonate, 2-iodobenzoate, 4-azidobutyrate, 4-nitro-4-methylpentanoate, o-(dibromomethyl)benzoate, 2-formylbenzenesulfonate, 2-(methylthiomethoxy)ethyl, 4-(methylthiomethoxy)butyrate, 2-(methylthiomethoxymethyl)benzoate, 2,6-dichloro-4-methylphenoxyacetate, 2,6-dichloro-4-(1,1,3,3-tetramethylbutyl)phenoxyacetate, 2,4-bis(1,1-dimethylpropyl)phenoxyacetate, chlorodiphenylacetate, isobutyrate, monosuccinoate, (E)-2-methyl-2-butenoate, o-(methoxycarbonyl)benzoate, α-naphthoate, nitrate, alkyl N,N,N′,N′-tetramethylphosphorodiamidate, alkyl N-phenylcarbamate, borate, dimethylphosphinothioyl, alkyl 2,4-dinitrophenylsulfenate, sulfate, methanesulfonate (mesylate), benzylsulfonate, and tosylate (Ts). For protecting 1,2- or 1,3-diols, the protecting groups include methylene acetal, ethylidene acetal, 1-t-butylethylidene ketal, 1-phenylethylidene ketal, (4-methoxyphenyl)ethylidene acetal, 2,2,2-trichloroethylidene acetal, acetonide, cyclopentylidene ketal, cyclohexylidene ketal, cycloheptylidene ketal, benzylidene acetal, p-methoxybenzylidene acetal, 2,4-dimethoxybenzylidene ketal, 3,4-dimethoxybenzylidene acetal, 2-nitrobenzylidene acetal, methoxymethylene acetal, ethoxymethylene acetal, dimethoxymethylene ortho ester, 1-methoxyethylidene ortho ester, 1-ethoxyethylidine ortho ester, 1,2-dimethoxyethylidene ortho ester, α-methoxybenzylidene ortho ester, 1-(N,N-dimethylamino)ethylidene derivative, α-(N,N′-dimethylamino)benzylidene derivative, 2-oxacyclopentylidene ortho ester, di-t-butylsilylene group (DTBS), 1,3-(1,1,3,3-tetraisopropyldisiloxanylidene) derivative (TIPDS), tetra-t-butoxydisiloxane-1,3-diylidene derivative (TBDS), cyclic carbonates, cyclic boronates, ethyl boronate, and phenyl boronate.

[0391] In some embodiments, a hydroxyl protecting group is acetyl, t-butyl, t-butoxymethyl, methoxymethyl, tetrahydropyranyl, 1-ethoxyethyl, 1-(2-chloroethoxy)ethyl, 2-trimethylsilylethyl, p-chlorophenyl, 2,4-dinitrophenyl, benzyl, benzoyl, p-phenylbenzoyl, 2,6-dichlorobenzyl, diphenylmethyl, p-nitrobenzyl, triphenylmethyl (trityl), 4,4′-dimethoxytrityl, trimethylsilyl, triethylsilyl, t-butyldimethylsilyl, t-butyldiphenylsilyl, triphenylsilyl, triisopropylsilyl, benzoylformate, chloroacetyl, trichloroacetyl, trifiuoroacetyl, pivaloyl, 9-fluorenylmethyl carbonate, mesylate, tosylate, triflate, trityl, monomethoxytrityl (MMTr), 4,4′-dimethoxytrityl, (DMTr) and 4,4′,4″-trimethoxytrityl (TMTr), 2-cyanoethyl (CE or Cne), 2-(trimethylsilyl)ethyl (TSE), 2-(2-nitrophenyl)ethyl, 2-(4-cyanophenyl)ethyl 2-(4-nitrophenyl)ethyl (NPE), 2-(4-nitrophenylsulfonyl)ethyl, 3,5-dichlorophenyl, 2,4-dimethylphenyl, 2-nitrophenyl, 4-nitrophenyl, 2,4,6-trimethylphenyl, 2-(2-nitrophenyl)ethyl, butylthiocarbonyl, 4,4′,4″-tris(benzoyloxy)trityl, diphenylcarbamoyl, levulinyl, 2-(dibromomethyl)benzoyl (Dbmb), 2-(isopropylthiomethoxymethyl)benzoyl (Ptmt), 9-phenylxanthen-9-yl (pixyl) or 9-(p-methoxyphenyl)xanthine-9-yl (MOX). In some embodiments, each of the hydroxyl protecting groups is, independently selected from acetyl, benzyl, t-butyldimethylsilyl, t-butyldiphenylsilyl and 4,4′-dimethoxytrityl. In some embodiments, the hydroxyl protecting group is selected from the group consisting of trityl, monomethoxytrityl and 4,4′-dimethoxytrityl group.

[0392] In some embodiments, a phosphorous protecting group is a group attached to the internucleotide phosphorous linkage throughout oligonucleotide synthesis. In some embodiments, the phosphorous protecting group is attached to the sulfur atom of the internucleotide phosphorothioate linkage. In some embodiments, the phosphorous protecting group is attached to the oxygen atom of the internucleotide phosphorothioate linkage. In some embodiments, the phosphorous protecting group is attached to the oxygen atom of the internucleotide phosphate linkage. In some embodiments the phosphorous protecting group is 2-cyanoethyl (CE or Cne), 2-trimethylsilylethyl, 2-nitroethyl, 2-sulfonylethyl, methyl, benzyl, o-nitrobenzyl, 2-(p-nitrophenyl)ethyl (NPE or Npe), 2-phenylethyl, 3-(N-tert-butylcarboxamido)-1-propyl, 4-oxopentyl, 4-methylthio-1-butyl, 2-cyano-1,1-dimethylethyl, 4-N-methylaminobutyl, 3-(2-pyridyl)-1-propyl, 2-[N-methyl-N-(2-pyridyl)]aminoethyl, 2-(N-formyl,N-methyl)aminoethyl, 4-[N-methyl-N-(2,2,2-trifluoroacetyl)amino]butyl.

[0393] Protein: As used herein, the term “protein” refers to a polypeptide (i.e., a string of at least two amino acids linked to one another by peptide bonds). In some embodiments, proteins include only naturally-occurring amino acids. In some embodiments, proteins include one or more non-naturally-occurring amino acids (e.g., moieties that form one or more peptide bonds with adjacent amino acids). In some embodiments, one or more residues in a protein chain contain a non-amino-acid moiety (e.g., a glycan, etc). In some embodiments, a protein includes more than one polypeptide chain, for example linked by one or more disulfide bonds or associated by other means. In some embodiments, proteins contain L-amino acids, D-amino acids, or both; in some embodiments, proteins contain one or more amino acid modifications or analogs known in the art. Useful modifications include, e.g., terminal acetylation, amidation, methylation, etc. The term “peptide” is generally used to refer to a polypeptide having a length of less than about 100 amino acids, less than about 50 amino acids, less than 20 amino acids, or less than 10 amino acids. In some embodiments, proteins are antibodies, antibody fragments, biologically active portions thereof, and/or characteristic portions thereof.

[0394] Ribozymes: The term “ribozyme”, as used herein, refers to a catalytic RNA that functions as an enzyme and does not require proteins for catalysis. In some embodiments, a ribozyme is a self-processing RNA that catalyzes RNA cleavage and ligation reactions. In some embodiments, a substrate recognition domain of a ribozyme is artificially engineered to stimulate site-specific cleavage in cis (the same nucleic acid strand) or trans (a non-covalently linked nucleic acid). Scherer et al. 2003 Nat Biotechnol. 21:1457-1465. In some embodiments, a ribozyme is subject to in vitro selection and directed evolution to generate improved properties and new functions for therapeutic and diagnostic reagents. In some embodiments, a ribozyme is engineered to be allosterically activated by effector molecules, which has led to the development of artificial “riboswitches” as biosensors and synthetic biological tools. Wieland et al. 2010 Chem Biol. 17:236-242; Liang et al. 2011 Mol Cell. 43:915-926. In some embodiments, a ribozyme is derived from a “hammerhead” or “hairpin/paperclip” motifs. In some embodiments, a ribozyme is delivered to the target cells in RNA form or can be transcribed from therapeutic genes. In some embodiments, a ribozyme is chemically modified with any one or more of the following modifications: 5′-PS backbone linkage, 2′-O-Me, 2′-deoxy-2′-C-allyl uridine, and terminal inverted 3′-3′ deoxyabasic nucleotides. A non-limiting example of a ribozyme is Angiozyme (RPI.4610), which targets the mRNA of the vascular endothelial growth factor receptor-1 (VEGFR-1) to block angiogenesis and tumor growth. Kobayashi et al. 2005 Cancer Chemother Pharmacol. 56:329-336; Weng et al. 2005 Mol Cancer Ther. 4:948-955. Another non-limiting example of a ribozyme is Heptazyme, a synthetic ribozyme against hepatitis C virus (HCV). Sandberg et al. 2001 Hepatology 34:333a-333a; Tong et al. 2002 Hepatology 36:360a-360a; Berk 2006 Hepatology 43:S13-S30. In some embodiments, Ribozymes include those that target any of: VEGFR-1, HCV IRES, HIV U5 and pol, HIV Tat and Vpr, CCR5, HIV Tat and Rev. In some embodiments, a composition comprises a lipid and a portion of a ribozyme capable of mediating at least one function of a ribozyme.

[0395] RNAi agent: The term “RNAi agent”, as used herein, refers to a molecule capable of mediating RNA interference. The term encompasses a variety of strucures and formats, including, as a non-limiting example, siRNAs (including but not limited to those of the “canonical” structure), in addition to various natural and artificial structures capable of mediating RNA interference. The term “RNA interference” or “RNAi”, as used herein, refers to a post-transcriptional, targeted gene-silencing technique that uses a RNAi agent to degrade messenger RNA (mRNA) containing a sequence which is the same as or very similar to the RNAi agent. See: Zamore and Haley, 2005, Science, 309, 1519-1524; Zamore et al., 2000, Cell, 101, 25-33; Elbashir et al., 2001, Nature, 41 1, 494-498; and Kreutzer et al., PCT Publication WO 00/44895; Fire, PCT Publication WO 99/32619; Mello and Fire, PCT Publication WO 01/29058; and the like. The process of RNAi occurs naturally when long dsRNA is introduced into a cell and cleaved by ribonuclease III (Dicer) into shorter fragments called siRNAs. Naturally produced siRNAs are typically about 21 nucleotides long and comprise about 19 base pair duplexes with two 2-nt overhangs (the “canonical” structure). One strand of the siRNA is reportedly incorporated into the RNA-induced silencing complex (RISC). This strand (known as the anti-sense or guide strand strand) guides RISC to a complementary mRNA. One or more nucleases in the RISC then reportedly mediates cleavage of the target mRNA to induce silencing. Cleavage of the target RNA reportedly takes place in the middle of the region complementary to the anti-sense strand. See: Nykanen, et al. 2001 Cell 107:309; Sharp et al. 2001 Genes Dev. 15:485; Bernstein, et al. 2001 Nature 409:363; Elbashir, et al. 2001 Genes Dev. 15:188. As various non-limiting examples, a RNAi agent includes: siRNAs (including but not limited to those of the canonical structure), shRNAs, miRNAs, sisiRNAs, meroduplex RNAs (mdRNAs), DNA-RNA chimeras, siRNAs comprising two mismatches (or more mismatches), neutral siRNAs, aiRNAs, or a siRNA comprising a terminal or internal spacer (e.g., an 18-mer format siRNA). In various non-limiting examples, the RNAi agent is a shRNA (small hairpin RNA or short hairpin RNA), which reportedly comprises a sequence of RNA that makes a tight hairpin turn and, like siRNAs, silences targets via RISC. The antisense and sense strand are thus reportedly connected by a hairpin. shRNAs reportedly can be expressed, for example, via delivery of plasmids or through viral or bacterial vectors. Various varieties of shRNAs have been reported in the art. See, for example: Xiang et al. 2006. Nature Biotech. 24: 697-702; Macrae et al. 2006 Science 31 1: 195-8. Lombardo et al. 2007. Nature Biotech. 25: 1298-1306; Wang et al. 2011. Pharm. Res. 28: 2983-2995; Senzer et al. 2011 Mol. Ther. 20: 679-686. In various non-limiting examples, the RNAi agent is a miRNA (microRNA), which reportedly is a small RNA molecule (ca. 22 nt) that, like siRNAs, also silences targets via RISC. Naturally-occurring miRNAs are encoded by eukaryotic nuclear DNA; miRNAs are generated by post-transcriptional RNA processing, and function via base-pairing with complementary sequences within mRNA molecules, usually resulting in translational repression or target degradation and gene silencing. The human genome can reportedly encode over 1000 miRNAs, which may target about 60% of mammalian genes and are abundant in many human cell types. Various varieties of naturally-occurring and artificial derivatives of miRNAs have been reported in the art. See, for example: Lewis et al. 2003. Cell 1 15: 787-798; Lim et al. 2003. Genes Dev. 17: 991-1008; He et al. 2004. Nat. Rev. Genet. 5: 522-31; Bentwich et al. 2005. Nat. Genet. 37: 766-70; Lewis et al. 2005. Cell 120: 15-20; Kusenda et al. 2006. Biomed Pap Med Fac Univ Palacky Olomouc Czech Repub 150: 205-15; Zhang et al. 2006. J. Gen. Gen. 36: 1-6; Brodersen et al. 2008. Science 320: 1 185-90; Friedman et al. 2009. Genome Res. 19 (1): 92-105; Bartel 2009. Cell 136 (2): 215-33. In various non-limiting examples, the RNAi agent is a sisiRNA (small internally segmented interfering RNA), wherein the sense strand comprises at least one single-stranded nick. This nick decreases the incorporation of the sense strand into the RISC complex and thus reduces off-target effects. See: WO 2007/107162. In various non-limiting examples, a DNA-RNA chimera, wherein the seed portion of each strand is DNA, while the remainder of each strand is RNA. See: Yamato et al. 2011 Cancer Gene Ther. 18: 587-597. In various non-limiting examples, the RNAi agent is a siRNA comprising two mismatches, wherein that the molecule reportedly comprises three short double-stranded regions. In one embodiment of this RNAi agent, the guide (antisense) strand is a 22-mer, while the sense strand is a 20-mer (producing only a single 2-nt overhang on the 3′ end of the anti-sense strand; and two mismatches reportedly produce double-stranded regions of 6, 8 and 4 bp. See: U.S. Pat. App. 2009/0209626. In various embodiments, the RNAi agent is a neutral siRNA, in which the negative charges of the phosphate backbone are reversibly masked; Meade et al. 2014 Nat. Biotech. 32: 1256-1261. In various non-limiting examples, the RNAi agent is a aiRNA (assymetrical interfering RNA) which comprises a sense strand is shorter than 19-nt long, so that the anti-sense strand is reportedly preferentially loaded into RISC, and thus off-target effects are reduced. In various embodiments of this RNAi agent, the anti-sense strand is 21-nt long, but the sense strand is only 15 or 16 nt long. See: Sun et al. 2008 Nature Biotech. 26: 1379-1382; and Chu and Rana. 2008 RNA 14: 1714-1719. In various non-limiting examples, the RNAi agent is a siRNA comprising a terminal or internal spacer (e.g., an 18-mer format siRNA), which reportedly comprises a strand which is shorter than that of a canonical siRNA, wherein the strand comprises an internal or terminal spacer such as a ribitol or other type of non-nucleotidic spacer. See: WO2015/051366. In some embodiments, RNAi agents include those that target any of: miR-122, VEGF, VEGF-R1, RTP801, Caspase 2, KRT6A (N171K), ADRB2, TRPV1, Syk kinase, RSV Nucleocapsid, Beta catenin, KRASG12D, Apo B, PLK1, KSP and VEGF, TTR, Bcr-Abl, PKN3, P53, RRM2, Furin and GM-CSF, LMP2, LMP7, MECL1, HIV Tat and Rev. In some embodiments, a composition comprises a lipid and a portion of a RNAi agent capable of mediating at least one function of a RNAi agent.

[0396] Sample: A “sample” as used herein is a specific organism or material obtained therefrom. In some embodiments, a sample is a biological sample obtained or derived from a source of interest, as described herein. In some embodiments, a source of interest comprises an organism, such as an animal or human. In some embodiments, a biological sample comprises biological tissue or fluid. In some embodiments, a biological sample is or comprises bone marrow; blood; blood cells; ascites; tissue or fine needle biopsy samples; cell-containing body fluids; free floating nucleic acids; sputum; saliva; urine; cerebrospinal fluid, peritoneal fluid; pleural fluid; feces; lymph; gynecological fluids; skin swabs; vaginal swabs; oral swabs; nasal swabs; washings or lavages such as a ductal lavages or broncheoalveolar lavages; aspirates; scrapings; bone marrow specimens; tissue biopsy specimens; surgical specimens; feces, other body fluids, secretions, and/or excretions; and/or cells therefrom, etc. In some embodiments, a biological sample is or comprises cells obtained from an individual. In some embodiments, a sample is a “primary sample” obtained directly from a source of interest by any appropriate means. For example, in some embodiments, a primary biological sample is obtained by methods selected from the group consisting of biopsy (e.g., fine needle aspiration or tissue biopsy), surgery, collection of body fluid (e.g., blood, lymph, feces etc.), etc. In some embodiments, as will be clear from context, the term “sample” refers to a preparation that is obtained by processing (e.g., by removing one or more components of and/or by adding one or more agents to) a primary sample. For example, filtering using a semi-permeable membrane. Such a “processed sample” may comprise, for example nucleic acids or proteins extracted from a sample or obtained by subjecting a primary sample to techniques such as amplification or reverse transcription of mRNA, isolation and/or purification of certain components, etc. In some embodiments, a sample is an organism. In some embodiments, a sample is a plant. In some embodiments, a sample is an animal. In some embodiments, a sample is a human. In some embodiments, a sample is an organism other than a human.

[0397] Small molecule: The terms “small molecule” or “low molecular weight molecule” or “LMW molecule” and the like, as used herein, refer to molecules which have a relatively low molecular weight. As a non-limiting example, small molecules include molecules that are less than about 7500, 7000, 6000, 5000, 4000, 3000, 2500, 2000, 1500, 1000, 900, 800, 700, 600, 500, 400, 300, 200, or 100 molecular weight. In some embodiments, a small molecule is a biologically active agent, and inhibit or decrease target gene or target gene product level, product, and/or activity. Example small molecules include, but are not limited to, small organic molecules (e.g., Cane et al. 1998. Science 282: 63), and natural product extract libraries. In another embodiment, small molecules are small, organic non-peptidic compounds. In some embodiments, small molecule inhibitors indirectly or directly inhibit or decrease target gene or target gene product level, product, and/or activity. In some embodiments, a composition comprises a lipid and a portion of a small molecule capable of mediating at least one function of a small molecule.

[0398] Small nucleolar RNAs (snoRNAs): The terms “small nucleolar RNA”, “snoRNA” and the like, as used herein, refer to any of a class of small RNA molecules that, for example, guide chemical modifications of other RNAs. In some embodiments, snoRNAs are capable of guiding chemical modifications of other RNAs, including ribosomal RNAs, transfer RNAs and small nuclear RNAs. In some embodiments, there are reportedly two main classes of snoRNA, the C/D box snoRNAs, which are associated with methylation, and the H/ACA box snoRNAs, which are associated with pseudouridylation.

[0399] Splice switching oligonucleotide (SSO): The term “Splice switching oligonucleotide” or “SSO”, as used herein, refers to an oligonucleotide capable of altering the splicing of a pre-mRNA. In a non-limiting example, a SSO can bind to a 5′ or 3′ splicing junction or to exonic splicing enhancer or silencing sites. In doing so, a SSO can modify splicing in various ways, such as promoting alternative use of exons, exon exclusion, or exon inclusion. In various embodiments, a SSO can cause an exon to be skipped; or, in other cases, prevent the skipping of an exon. Crooke 2004 Curr. Mol. Med. 4: 465-487; Bennett et al. 2010 Ann. Rev. Pharmacol. Toxicol. 50: 259-293; and Kole et al. 2012 Nat. Rev. Drug Discov. 11: 125-140. A non-limiting example of a SSO is an oligonucleotide which is reportedly capable of mediating skipping of an exon in dystrophin pre-mRNA. A non-limiting example of a SSO is WV-942. A non-limiting example of a SSO is an oligonucleotide which is capable of preventing the skipping of an exon in the SMN2 pre-mRNA; see Rigo et al. 2012 J. Cell Biol. 199: 21-25; and Kaczmarek et al. 2015 Exp. Opin. Exp. Drugs 24: 867-881. In some embodiments, a composition comprises a lipid and a portion of a snoRNA capable of mediating at least one function of a snoRNA. In some embodiments, a SSO switches splicing in a gene related to a muscle-related disorder. In some embodiments, a SSO is capable of skipping or mediating the skipping of an exon, wherein a mutation in the exon is related to a muscle-related disorder. In some embodiments, a SSO is capable of preventing the skipping or mediating the prevent of skipping of an exon, wherein a mutation in the exon is related to a muscle-related disorder. In some embodiments, a SSO is capable of skipping or mediates skipping of an exon in the dystrophin gene. In some embodiments, a SSO is capable of skipping or mediates skipping of exon 51, 45, 53 or 44 in the dystrophin gene. In some embodiments, a SSO is capable of preventing or mediating the prevention of skipping of an exon in a gene related to SMA. In some embodiments, a SSO is capable of preventing or mediating the prevention of skipping of an exon in the SMN2 gene. In some embodiments, a SSO is capable of preventing or mediating the prevention of skipping of exon 7 in the SMN2 gene.

[0400] Stereochemically isomericforms: The phrase “stereochemically isomeric forms,” “stereoisomers,” and the like, as used herein, refers to different compounds made up of the same atoms bonded by the same sequence of bonds but having different three-dimensional structures which are not interchangeable. In some embodiments of the invention, provided chemical compositions may be or include pure preparations of individual stereochemically isomeric forms of a compound; in some embodiments, provided chemical compositions may be or include mixtures of two or more stereochemically isomeric forms of the compound. In certain embodiments, such mixtures contain equal amounts of different stereochemically isomeric forms; in certain embodiments, such mixtures contain different amounts of at least two different stereochemically isomeric forms. In some embodiments, a chemical composition may contain all diastereomers and/or enantiomers of the compound. In some embodiments, a chemical composition may contain less than all diastereomers and/or enantiomers of a compound. In some embodiments, if a particular enantiomer of a compound of the present invention is desired, it may be prepared, for example, by asymmetric synthesis, or by derivation with a chiral auxiliary, where the resulting diastereomeric mixture is separated and the auxiliary group cleaved to provide the pure desired enantiomers. Alternatively, where the molecule contains a basic functional group, such as amino, diastereomeric salts are formed with an appropriate optically-active acid, and resolved, for example, by fractional crystallization. In some embodiments, a composition which is stereorandom comprises two or more stereoisomers.

[0401] Subject and related terms: As used herein, the term “subject”, “human subject”, “test subject” and related terms, as used herein, refer to any organism to which a provided compound or composition is administered in accordance with the present invention e.g., for experimental, diagnostic, prophylactic, and/or therapeutic purposes. Typical subjects include animals (e.g., mammals such as mice, rats, rabbits, non-human primates, and humans; insects; worms; etc.) and plants. In some embodiments, a subject may be suffering from, and/or susceptible to a disease, disorder, and/or condition. In some embodiments, a subject is a human being or other mammal. In some embodiments, a subject can be male or female. In non-limiting examples, the animal is a vertebrate such as a primate, rodent, domestic animal or game animal. In non-limiting examples, primates include chimpanzees, cynomologous monkeys, spider monkeys, and macaques, e.g., Rhesus. Rodents include mice, rats, woodchucks, ferrets, rabbits and hamsters. In non-limiting examples, domestic and game animals include cows, horses, pigs, deer, bison, buffalo, feline species, e.g., domestic cat, canine species, e.g., dog, fox, wolf, avian species, e.g., chicken, emu, ostrich, and fish, e.g., trout, catfish and salmon. In certain embodiments of the aspects described herein, the subject is a mammal, e.g., a primate, e.g., a human. In non-limiting examples, the mammal can be a human, non-human primate, mouse, rat, dog, cat, horse, or cow, but are not limited to these examples. In some embodiments, a mammal other than a human can be advantageously used as subjects that represent animal models of disorders associated with autoimmune disease or inflammation. In some embodiments, a method and composition described herein can be used to treat domesticated animals and/or pets.

[0402] Substantially: As used herein, the term “substantially” refers to the qualitative condition of exhibiting total or near-total extent or degree of a characteristic or property of interest. One of ordinary skill in the biological arts will understand that biological and chemical phenomena rarely, if ever, go to completion and/or proceed to completeness or achieve or avoid an absolute result. The term “substantially” is therefore used herein to capture the potential lack of completeness inherent in many biological and/or chemical phenomena.

[0403] Suffering from: An individual who is “suffering from” a disease, disorder, and/or condition has been diagnosed with and/or displays one or more symptoms of a disease, disorder, and/or condition.

[0404] Susceptible to: An individual who is “susceptible to” a disease, disorder, and/or condition is one who has a higher risk of developing the disease, disorder, and/or condition than does a member of the general public. In some embodiments, an individual who is susceptible to a disease, disorder and/or condition may not have been diagnosed with the disease, disorder, and/or condition. In some embodiments, an individual who is susceptible to a disease, disorder, and/or condition may exhibit symptoms of the disease, disorder, and/or condition. In some embodiments, an individual who is susceptible to a disease, disorder, and/or condition may not exhibit symptoms of the disease, disorder, and/or condition. In some embodiments, an individual who is susceptible to a disease, disorder, and/or condition will develop the disease, disorder, and/or condition. In some embodiments, an individual who is susceptible to a disease, disorder, and/or condition will not develop the disease, disorder, and/or condition.

[0405] Systemic: The phrases “systemic administration,” “administered systemically,” “peripheral administration,” and “administered peripherally” as used herein have their art-understood meaning referring to administration of a compound or composition such that it enters the recipient's system.

[0406] Targeting compound or moiety or component: The term “targeting moiety”, “targeting compound or moiety”, “targeting compound”, “target component”, and the like, as used herein, is a structure capable of targeting a compound or composition to a particular cell or tissue or subset of cells or tissues. In some embodiments, a targeting moiety is designed to take advantage of cell- or tissue-specific expression of particular targets, receptors, proteins, or other subcellular components; In some embodiments, a targeting moiety is a ligand (e.g., a small molecule, antibody, peptide, protein, carbohydrate, aptamer, etc.) that targets a compound or a composition to a cell or tissue, and/or binds to a target, receptor, protein, or other subcellular component. In some embodiments, a targeting moiety targets a composition comprising a lipid and a biologically active agent to a muscle cell or tissue. In some embodiments, a targeting moiety comprises a compound that targets a muscle cell or tissue. In some embodiments, a targeting moiety comprises fetuin, epidermal growth factor, fibroblast growth factor, insulin, and/or dexamethasone, or a component or fragment or combination thereof. In some embodiments, a targeting moiety targets a composition comprising a lipid and a biologically active agent to a neuron or other cell or tissue in the neuromuscular system. In some embodiments, a targeting moiety comprises a rabies virus peptide (see Kumar et al. 2007 Nature 448: 39-43; and Hwang do et al. 2011 Biomaterials 32: 4968-4975). In some embodiments, a targeting moiety is a moiety capable of binding to a neurotransmitter transporter, a dopamine transporter, a serotonin transporter, or norepinephrine transporter, or alpha-synuclein, or a mRNA encoding any of these components (see U.S. Pat. No. 9,084,825). In some embodiments, a targeting moiety is a transferrin receptor ligand or alpha-transferrin antibody, thus reportedly making use of a transferrin receptor-mediated route across the vascular endothelium. Clark et al. 2015 Proc. Natl. Acad. Sci. USA 112: 12486-12491; Bien-Ly et al. 2014 J. Exp. Med. 211: 233-244; and Youn et al. 2014 Mol. Pharm. 11: 486-495. In some embodiments, a targeting moiety binds to an integrin. In some embodiments, a targeting moiety binds to alphaIIbeta3, e.g., on platelets. In some embodiments, a targeting moiety binds to a beta2 integrin, e.g., on a leukocyte. In some embodiments, a targeting moiety binds to an alphavbeta3, e.g., on a tumor cell. In some embodiments, a targeting moiety binds to a GPCR (G protein-coupled receptor) (see Hanyaloglu et al. 2008 Ann. Rev. Pharm. Tox. 48: 537-568). In some embodiments, a targeting moiety binds to a gastrin releasing peptide receptor, e.g., on a cancer cell (see Cornelio et al. 2007 Ann. Oncol. 18: 1457-1466). In some embodiments, a targeting moiety comprises a carbonic anhydrase inhibitor.

[0407] Tautomeric forms: The phrase “tautomeric forms,” as used herein, is used to describe different isomeric forms of organic compounds that are capable of facile interconversion. Tautomers may be characterized by the formal migration of a hydrogen atom or proton, accompanied by a switch of a single bond and adjacent double bond. In some embodiments, tautomers may result from prototropic tautomerism (i.e., the relocation of a proton). In some embodiments, tautomers may result from valence tautomerism (i.e., the rapid reorganization of bonding electrons). All such tautomeric forms are intended to be included within the scope of the present invention. In some embodiments, tautomeric forms of a compound exist in mobile equilibrium with each other, so that attempts to prepare the separate substances results in the formation of a mixture. In some embodiments, tautomeric forms of a compound are separable and isolatable compounds. In some embodiments of the invention, chemical compositions may be provided that are or include pure preparations of a single tautomeric form of a compound. In some embodiments of the invention, chemical compositions may be provided as mixtures of two or more tautomeric forms of a compound. In certain embodiments, such mixtures contain equal amounts of different tautomeric forms; in certain embodiments, such mixtures contain different amounts of at least two different tautomeric forms of a compound. In some embodiments of the invention, chemical compositions may contain all tautomeric forms of a compound. In some embodiments of the invention, chemical compositions may contain less than all tautomeric forms of a compound. In some embodiments of the invention, chemical compositions may contain one or more tautomeric forms of a compound in amounts that vary over time as a result of interconversion. In some embodiments of the invention, the tautomerism is keto-enol tautomerism. One of skill in the chemical arts would recognize that a keto-enol tautomer can be “trapped” (i.e., chemically modified such that it remains in the “enol” form) using any suitable reagent known in the chemical arts to provide an enol derivative that may subsequently be isolated using one or more suitable techniques known in the art. Unless otherwise indicated, the present invention encompasses all tautomeric forms of relevant compounds, whether in pure form or in admixture with one another.

[0408] Therapeutic agent: As used herein, the phrase “therapeutic agent” refers to any agent that, when administered to a subject, has a therapeutic effect and/or elicits a desired biological and/or pharmacological effect. In some embodiments, a therapeutic agent is any substance that can be used to alleviate, ameliorate, relieve, inhibit, prevent, delay onset of, reduce severity of, and/or reduce incidence of one or more symptoms or features of a disease, disorder, and/or condition.

[0409] Therapeutically effective amount: As used herein, the term “therapeutically effective amount” means an amount of a substance (e.g., a therapeutic agent, composition, and/or formulation) that elicits a desired biological response when administered as part of a therapeutic regimen. In some embodiments, a therapeutically effective amount of a substance is an amount that is sufficient, when administered to a subject suffering from or susceptible to a disease, disorder, and/or condition, to treat, diagnose, prevent, and/or delay the onset of the disease, disorder, and/or condition. As will be appreciated by those of ordinary skill in this art, the effective amount of a substance may vary depending on such factors as the desired biological endpoint, the substance to be delivered, the target cell or tissue, etc. For example, the effective amount of compound in a formulation to treat a disease, disorder, and/or condition is the amount that alleviates, ameliorates, relieves, inhibits, prevents, delays onset of, reduces severity of and/or reduces incidence of one or more symptoms or features of the disease, disorder, and/or condition. In some embodiments, a therapeutically effective amount is administered in a single dose; in some embodiments, multiple unit doses are required to deliver a therapeutically effective amount.

[0410] Treat: As used herein, the term “treat,” “treatment,” or “treating” refers to any method used to partially or completely alleviate, ameliorate, relieve, inhibit, prevent, delay onset of, reduce severity of, and/or reduce incidence of one or more symptoms or features of a disease, disorder, and/or condition. Treatment may be administered to a subject who does not exhibit signs of a disease, disorder, and/or condition. In some embodiments, treatment may be administered to a subject who exhibits only early signs of the disease, disorder, and/or condition, for example for the purpose of decreasing the risk of developing pathology associated with the disease, disorder, and/or condition.

[0411] Unsaturated: The term “unsaturated” as used herein, means that a moiety has one or more units of unsaturation.

[0412] Unit dose: The expression “unit dose” as used herein refers to an amount administered as a single dose and/or in a physically discrete unit of a pharmaceutical composition. In many embodiments, a unit dose contains a predetermined quantity of an active agent. In some embodiments, a unit dose contains an entire single dose of the agent. In some embodiments, more than one unit dose is administered to achieve a total single dose. In some embodiments, administration of multiple unit doses is required, or expected to be required, in order to achieve an intended effect. A unit dose may be, for example, a volume of liquid (e.g., an acceptable carrier) containing a predetermined quantity of one or more therapeutic agents, a predetermined amount of one or more therapeutic agents in solid form, a sustained release formulation or drug delivery device containing a predetermined amount of one or more therapeutic agents, etc. It will be appreciated that a unit dose may be present in a formulation that includes any of a variety of components in addition to the therapeutic agent(s). For example, acceptable carriers (e.g., pharmaceutically acceptable carriers), diluents, stabilizers, buffers, preservatives, etc., may be included as described infra. It will be appreciated by those skilled in the art, in many embodiments, a total appropriate daily dosage of a particular therapeutic agent may comprise a portion, or a plurality, of unit doses, and may be decided, for example, by the attending physician within the scope of sound medical judgment. In some embodiments, the specific effective dose level for any particular subject or organism may depend upon a variety of factors including the disorder being treated and the severity of the disorder; activity of specific active compound employed; specific composition employed; age, body weight, general health, sex and diet of the subject; time of administration, and rate of excretion of the specific active compound employed; duration of the treatment; drugs and/or additional therapies used in combination or coincidental with specific compound(s) employed, and like factors well known in the medical arts.

[0413] Vaccine: The term “vaccine”, as used herein, refers to a molecule that improves immunity to a particular disease or infectious agent. Vaccines encoded in the polynucleotides, primary constructs or mmRNA of the invention may be utilized to treat conditions or diseases in many therapeutic areas such as, but not limited to, cardiovascular, CNS, dermatology, endocrinology, oncology, immunology, respiratory, and anti-infective. In some embodiments, a vaccine comprises an agent that immunologically resembles a disease-causing micro-organism or fragment thereof; In some embodiments, a vaccine is made from weakened or killed forms of the virus, microbe, parasite or other pathogen, or a fragment thereof. In some embodiments, a vaccine stimulates the body's immune system to recognize the agent as a threat, destroy it, and keep a record of it, so that the immune system can more easily recognize and destroy any of these micro-organisms that it later encounters. In some embodiments, a vaccine is prophylactic or therapeutic. In various embodiments, a vaccine can be to a virus, a bacterium, a parasite, or another pathogen. In some embodiments, a vaccine is to a virus selected from: common cold virus, Hepatitis A virus, Hepatitis B virus, Hepatitis E virus, Human papillomavirus, Influenza virus, Japanese encephalitis virus, Measles virus, Mumps virus, Polio virus, Rabies virus, Rhinovirus, Rotavirus, Rubella virus, Varicella zoster virus, Variola virus, and Yellow fever virus. In various embodiments, a vaccine is a vaccine selected from: a virus vaccine, Adenovirus vaccine, Coxsackie B virus vaccine, Cytomegalovirus vaccine, Dengue vaccine for humans, Eastern Equine encephalitis virus vaccine for humans, Ebola vaccine, Enterovirus 71 vaccine, Epstein-Barr vaccine, Hepatitis C vaccine, HIV vaccine, HTLV-1 T-lymphotropic leukemia vaccine for humans, Marburg virus disease vaccine, Norovirus vaccine, Respiratory syncytial virus vaccine for humans, Severe acute respiratory syndrome (SARS) vaccine, West Nile virus vaccine for humans, and Zika virus vaccine. In some embodiments, a vaccine is to a bacterium selected from: Bacillus anthracis, Vibrio cholerae, Bordetella pertussis, Clostridium tetani, Corynebacterium diphtheriae, Haemophilus influenzae type B (Hib), Neisseria meningitidis, Streptococcus pneumoniae, Coxiella burnetii, Mycobacterium tuberculosis, and Salmonella typhi. In various embodiments, a vaccine is a vaccine selected from: a Bacterial disease vaccine, Caries vaccine, Ehrlichiosis vaccine, Leprosy vaccine, Lyme disease vaccine, Staphylococcus aureus vaccine, Streptococcus pyogenes vaccine, Syphilis vaccine, Tularemia vaccine, and Yersinia pestis vaccine. In various embodiments, a vaccine is a vaccine selected from: A parasitic disease vaccine, Malaria vaccine, Schistosomiasis vaccine, Chagas disease vaccine, Hookworm vaccine, Onchocerciasis river blindness vaccine for humans, Trypanosomiasis vaccine, and Visceral leishmaniasis vaccine. In various embodiments, a vaccine is selected from: a non-infectious disease vaccine, Alzheimer's disease amyloid protein vaccine, Breast cancer vaccine, Ovarian cancer vaccine, Prostate cancer vaccine, and Talimogene laherparepvec (T-VEC). In some embodiments, a composition comprises a lipid and a portion of a vaccine capable of mediating at least one function of a vaccine.

[0414] Wild-type: As used herein, the term “wild-type” has its art-understood meaning that refers to an entity having a structure and/or activity as found in nature in a “normal” (as contrasted with mutant, diseased, altered, etc) state or context. Those of ordinary skill in the art will appreciate that wild type genes and polypeptides often exist in multiple different forms (e.g., alleles).

[0415] Nucleic acid: The term “nucleic acid”, as used herein, includes any nucleotides, analogs, and polymers thereof. The term “polynucleotide” as used herein refers to a polymeric form of nucleotides of any length, either ribonucleotides (RNA) or deoxyribonucleotides (DNA). These terms refer to the primary structure of the molecules and, thus, include double- and single-stranded DNA, and double- and single-stranded RNA. These terms include, as equivalents, analogs of either RNA or DNA made from nucleotide analogs and modified polynucleotides such as, though not limited to, methylated, protected and/or capped nucleotides or polynucleotides. The terms encompass poly- or oligo-ribonucleotides (RNA) and poly- or oligo-deoxyribonucleotides (DNA); RNA or DNA derived from N-glycosides or C-glycosides of nucleobases and/or modified nucleobases; nucleic acids derived from sugars and/or modified sugars; and nucleic acids derived from phosphate bridges and/or modified phosphorus-atom bridges or internucleotidic linkage. The term encompasses nucleic acids containing any combinations of nucleobases, modified nucleobases, sugars, modified sugars, phosphate bridges or modified phosphorus atom bridges. Examples include, and are not limited to, nucleic acids containing ribose moieties, the nucleic acids containing deoxy-ribose moieties, nucleic acids containing both ribose and deoxyribose moieties, nucleic acids containing ribose and modified ribose moieties. The prefix poly- refers to a nucleic acid containing 2 to about 10,000 nucleotide monomer units and wherein the prefix oligo- refers to a nucleic acid containing 2 to about 200 nucleotide monomer units. In some embodiments, a nucleic acid includes, but not limited to, deoxyribonucleotides or ribonucleotides and polymers thereof, for example, in at least partially single- or double-stranded form. In some embodiments, a nucleic acid includes any nucleotides, modified nucleotides, and/or nucleotide analogs, and polymers thereof. In some embodiments, a polynucleotide includes a polymeric form of nucleotides of any length, either ribonucleotides (RNA) or deoxyribonucleotides (DNA). These terms refer to the primary structure of the molecules and, thus, include double- and single-stranded DNA, and double- and single-stranded RNA. These terms include, as equivalents, analogs of either RNA or DNA made from nucleotide analogs and modified polynucleotides such as, though not limited to, methylated, protected and/or capped nucleotides or polynucleotides. Analogs of RNA and DNA (e.g., nucleotide analogs) include, but are not limited to: Morpholino, PNA, LNA, BNA, TNA, GNA, ANA, FANA, CeNa, HNA and UNA. Modified nucleotides include those which are modified in the phosphate, sugar, and/or base. Such modifications include sugar modifications at the 2′ carbon, such as 2′-MOE, 2′-OMe, and 2′-F. In some embodiments, a nucleic acid includes a poly- or oligo-ribonucleotide (RNA) and poly- or oligo-deoxyribonucleotide (DNA); RNA or DNA derived from N-glycosides or C-glycosides of nucleobases and/or modified nucleobases; nucleic acids derived from sugars and/or modified sugars; and nucleic acids derived from phosphate bridges and/or modified phosphorus-atom bridges or internucleotidic linkage. The term encompasses nucleic acids containing any combinations of nucleobases, modified nucleobases, sugars, modified sugars, phosphate bridges or modified phosphorus atom bridges. Examples include, and are not limited to, nucleic acids containing ribose moieties, the nucleic acids containing deoxy-ribose moieties, nucleic acids containing both ribose and deoxyribose moieties, nucleic acids containing ribose and modified ribose moieties. In some embodiments, a nucleic acid is an oligonucleotide, an antisense oligonucleotide, an RNAi agent, a miRNA, splice switching oligonucleotide (SSO), immunomodulatory nucleic acid, an aptamer, a ribozyme, a Piwi-interacting RNA (piRNA), a small nucleolar RNA (snoRNA), a mRNA, a lncRNA, a ncRNA, an antigomir (e.g., an antagonist to a miRNA, lncRNA, ncRNA or other nucleic acid), a plasmid, a vector, or a portion thereof. In some embodiments, a nucleic acid is a chirally controlled nucleic acid composition. In some embodiments, the biologically active agent is a chirally controlled oligonucleotide composition, or a chirally controlled nucleic acid composition. In some embodiments, a base, nucleobase, nitrogenous base, heterocyclic base and the like includes a part (or a modified variant thereof) of a nucleic acid that is involved in the hydrogen-bonding that binds one nucleic acid strand to another complementary strand in a sequence-specific manner. The naturally occurring bases, [guanine, (G), adenine, (A), cytosine, (C), thymine, (T), and uracil (U)] are derivatives of purine (Pu) or pyrimidine (Py), though it should be understood that naturally and non-naturally occurring base analogs are also included. In some embodiments, the nucleobases are modified adenine, guanine, uracil, cytosine, or thymine. In some embodiments, the modified nucleobase mimics the spatial arrangement, electronic properties, or some other physicochemical property of the nucleobase and retains the property of hydrogen-bonding that binds one nucleic acid strand to another in a sequence specific manner. In some embodiments, a modified nucleobase can pair with all of the five naturally occurring bases (uracil, thymine, adenine, cytosine, or guanine) without substantially affecting the melting behavior, recognition by intracellular enzymes or activity of the oligonucleotide duplex. Various additional modifications of the base are known in the art. In some cases, a nucleic acid sequence may be defined as a sequence of bases, generally presented in the 5′ to 3′ direction. While in the context of a nucleic acid, a base is normally conjugated to a sugar which forms the backbone along with an internucleotidic linkage (e.g., a phosphate or phosphorothioate); however, as used herein, the term “base” does not comprise a sugar or an internucleotidic linkage. In some embodiments, a nucleoside includes a unit consisting of: (a) a base covalently bound to (b) a sugar. The base and/or sugar can be modified or not modified. In some embodiments, a sugar, as referenced herein in the context of referencing a nucleic acid, includes to a monosaccharide in closed and/or open form. The naturally occurring sugar is the pentose (five-carbon sugar) deoxyribose (which forms DNA) or ribose (which forms RNA), though it should be understood that naturally and non-naturally occurring sugar analogs are also included. Sugars include, but are not limited to, ribose, deoxyribose, pentofuranose, pentopyranose, and hexopyranose moieties. As used herein, the term also encompasses structural analogs used in lieu of conventional sugar molecules, such as glycol, polymer of which forms the backbone of the nucleic acid analog, glycol nucleic acid (“GNA”). A deoxynucleoside comprises a deoxyribose. In some cases, a nucleic acid sequence may be defined as a sequence of bases and sugar modifications. In some embodiments, a sugar includes a modified sugar or unmodified sugar. In some embodiments, a modified sugar includes, as referenced in the context of a nucleic acid, a sugar which has been modified or a moiety that can functionally replace a sugar in a nucleic acid or modified nucleic acid. The modified sugar mimics the spatial arrangement, electronic properties, or some other physicochemical property of a sugar. A modified sugar, as a non-limiting example, can have a modification at the 2′ carbon. Various modifications include 2′-MOE, 2′-OMe and 2′-F. Various additional modifications of the sugar are known in the art. In some embodiments, a nucleotide includes to a monomeric unit of a polynucleotide that consists of: (a) a heterocyclic base, a sugar, and one or more phosphate groups or phosphorus-containing internucleotidic linkages; a nucleotide is a subunit of a polynucleotide, nucleic acid or oligonucleotide. Each base, sugar and phosphate or internucleoside linker can be independently modified or not modified. Many internucleotidic linkages are known in the art (such as, though not limited to, phosphate, phosphorothioates, boranophosphates and the like). Artificial nucleic acids include PNAs (peptide nucleic acids), phosphotriesters, phosphorothionates, H-phosphonates, phosphoramidates, boranophosphates, methylphosphonates, phosphonoacetates, thiophosphonoacetates and other variants of the phosphate backbone of native nucleic acids, such as those described herein. In some embodiments, an internucleotidic linkage includes linkage between nucleoside units of an oligonucleotide; in most cases the linkage comprises a phosphorus or linkage phosphorus; in some embodiments, the linkage is referred to as “p”. In some embodiments, an internucleotidic linkage is a phosphodiester linkage, as found in naturally occurring DNA and RNA molecules. In some embodiments, the linkage is a phosphorothioate. In some embodiments, the backbone of an oligonucleotide or a nucleic acid includes the alternating sugars and internucleotidic linkages (e.g., a phosphodiester or phosphorothioate). Unless specifically limited, the term encompasses nucleic acids containing known analogues of natural nucleotides which have similar binding properties as the reference nucleic acid and are metabolized in a manner similar to naturally occurring nucleotides. Unless otherwise indicated, a particular nucleic acid sequence also implicitly encompasses conservatively modified variants thereof (e.g., degenerate codon substitutions) and complementary sequences and as well as the sequence explicitly indicated. Specifically, degenerate codon substitutions may be achieved by generating sequences in which the third position of one or more selected (or all) codons is substituted with mixed-base and/or deoxyinosine residues (Batzer et al., Nucleic Acid Res. 19:5081 (1991); Ohtsuka et al., J. Biol. Chem. 260:2605-2608 (1985); and Rossolini et al., Mol. Cell. Probes 8:91-98 (1994)). Also included are molecules having naturally occurring phosphodiester linkages as well as those having non-naturally occurring linkages, e.g., for stabilization purposes. The nucleic acid may be in any physical form, e.g., linear, circular, or supercoiled. The term nucleic acid is used interchangeably with oligonucleotide, gene, cDNA, and mRNA encoded by a gene. In various embodiments, one or more nucleotides is modified or is substituted with one or more DNA, a peptide nucleic acid (PNA), locked nucleic acid (LNA), morpholino nucleotide, threose nucleic acid (TNA), glycol nucleic acid (GNA), arabinose nucleic acid (ANA), 2′-fluoroarabinose nucleic acid (FANA), cyclohexene nucleic acid (CeNA), anhydrohexitol nucleic acid (HNA), constrained ethyl (cEt), tricyclo-DNA (tc-DNA), xeno nucleic acid (XNA), and/or unlocked nucleic acid (UNA). In various embodiments, the nucleic acid comprises a modified internucleoside linker.

[0416] Nucleotide: The term “nucleotide” as used herein refers to a monomeric unit of a polynucleotide that consists of a heterocyclic base, a sugar, and one or more phosphate groups or phosphorus-containing internucleotidic linkages. The naturally occurring bases, (guanine, (G), adenine, (A), cytosine, (C), thymine, (T), and uracil (U)) are derivatives of purine or pyrimidine, though it should be understood that naturally and non-naturally occurring base analogs are also included. The naturally occurring sugar is the pentose (five-carbon sugar) deoxyribose (which forms DNA) or ribose (which forms RNA), though it should be understood that naturally and non-naturally occurring sugar analogs are also included. Nucleotides are linked via internucleotidic linkages to form nucleic acids, or polynucleotides. Many internucleotidic linkages are known in the art (such as, though not limited to, phosphate, phosphorothioates, boranophosphates and the like). Artificial nucleic acids include PNAs (peptide nucleic acids), phosphotriesters, phosphorothionates, H-phosphonates, phosphoramidates, boranophosphates, methylphosphonates, phosphonoacetates, thiophosphonoacetates and other variants of the phosphate backbone of native nucleic acids, such as those described herein. As described herein, in some embodiments, a nucleotide is a natural nucleotide; in some embodiments, a nucleotide is modified.

[0417] Nucleoside: The term “nucleoside”, as used herein, refers to a moiety wherein a nucleobase or a modified nucleobase is covalently bound to a sugar or modified sugar.

[0418] Sugar: The term “sugar”, as used herein, refers to a saccharide, in some embodiments, a monosaccharide in closed and/or open form. Sugars include, but are not limited to, ribose, deoxyribose, pentofuranose, pentopyranose, and hexopyranose moieties. As used herein, the term also encompasses structural analogs used in lieu of conventional sugar molecules, such as glycol, polymer of which forms the backbone of the nucleic acid analog, glycol nucleic acid (“GNA”).

[0419] Modified sugar: The term “modified sugar”, as used herein, refers to a moiety that can replace a sugar, in some embodiments, in oligonucleotides. The modified sugar mimics the spatial arrangement, electronic properties, or some other physicochemical property of a sugar.

[0420] Nucleobase: The term “nucleobase”, as used herein, refers to the parts of nucleic acids that are involved in the hydrogen-bonding that binds one nucleic acid strand to another complementary strand in a sequence specific manner. The most common naturally-occurring nucleobases are adenine (A), guanine (G), uracil (U), cytosine (C), and thymine (T). In some embodiments, the naturally-occurring nucleobases are modified adenine, guanine, uracil, cytosine, or thymine. In some embodiments, the naturally-occurring nucleobases are methylated adenine, guanine, uracil, cytosine, or thymine. In some embodiments, a nucleobase is a “modified nucleobase,” e.g., a nucleobase other than adenine (A), guanine (G), uracil (U), cytosine (C), and thymine (T). In some embodiments, the modified nucleobases are methylated adenine, guanine, uracil, cytosine, or thymine. In some embodiments, the modified nucleobase mimics the spatial arrangement, electronic properties, or some other physicochemical property of the nucleobase and retains the property of hydrogen-bonding that binds one nucleic acid strand to another in a sequence specific manner. In some embodiments, a modified nucleobase can pair with all of the five naturally occurring bases (uracil, thymine, adenine, cytosine, or guanine) without substantially affecting the melting behavior, recognition by intracellular enzymes or activity of the oligonucleotide duplex.

[0421] Chiral ligand: The term “chiral ligand” or “chiral auxiliary”, as used herein, refers to a moiety that is chiral and can be incorporated into a reaction so that the reaction can be carried out with certain stereoselectivity.

[0422] Condensing reagent: In a condensation reaction, the term “condensing reagent”, as used herein, refers to a reagent that activates a less reactive site and renders it more susceptible to attack by another reagent. In some embodiments, such another reagent is a nucleophile.

[0423] Blocking group: The term “blocking group”, as used herein, refers to a group that masks the reactivity of a functional group. The functional group can be subsequently unmasked by removal of the blocking group. In some embodiments, a blocking group is a protecting group.

[0424] Moiety: The term “moiety”, as used herein, refers to a specific segment or functional group of a molecule. Chemical moieties are often recognized chemical entities embedded in or appended to a molecule.

[0425] Solid support: The term “solid support”, as used herein, refers to any support which enables synthesis of nucleic acids. In some embodiments, the term refers to a glass or a polymer, that is insoluble in the media employed in the reaction steps performed to synthesize nucleic acids, and is derivatized to comprise reactive groups. In some embodiments, the solid support is Highly Cross-linked Polystyrene (HCP) or Controlled Pore Glass (CPG). In some embodiments, the solid support is Controlled Pore Glass (CPG). In some embodiments, the solid support is hybrid support of Controlled Pore Glass (CPG) and Highly Cross-linked Polystyrene (HCP).

[0426] Coding sequence: A DNA “coding sequence” or “coding region” is a double-stranded DNA sequence which is transcribed and translated into a polypeptide in vivo when placed under the control of appropriate expression control sequences. The boundaries of the coding sequence (the “open reading frame” or “ORF”) are determined by a start codon at the 5′ (amino) terminus and a translation stop codon at the 3′ (carboxyl) terminus. A coding sequence can include, but is not limited to, prokaryotic sequences, cDNA from eukaryotic mRNA, genomic DNA sequences from eukaryotic (e.g., mammalian) DNA, and synthetic DNA sequences. A polyadenylation signal and transcription termination sequence is, usually, be located 3′ to the coding sequence. The term “non-coding sequence” or “non-coding region” refers to regions of a polynucleotide sequence that are not translated into amino acids (e.g. 5′ and 3′ un-translated regions).

[0427] Reading frame: The term “reading frame”, as used herein, refers to one of the six possible reading frames, three in each direction, of the double stranded DNA molecule. The reading frame that is used determines which codons are used to encode amino acids within the coding sequence of a DNA molecule.

[0428] Homology: The terms “Homology” or “identity” or “similarity”, as used herein, refers to sequence similarity between two nucleic acid molecules. Homology and identity can each be determined by comparing a position in each sequence which can be aligned for purposes of comparison. When an equivalent position in the compared sequences is occupied by the same base, then the molecules are identical at that position; when the equivalent site occupied by the same or a similar nucleic acid residue (e.g., similar in steric and/or electronic nature), then the molecules can be referred to as homologous (similar) at that position. Expression as a percentage of homology/similarity or identity refers to a function of the number of identical or similar nucleic acids at positions shared by the compared sequences. A sequence which is “unrelated” or “non-homologous” shares less than 40% identity, less than 35% identity, less than 30% identity, or less than 25% identity with a sequence described herein. In comparing two sequences, the absence of residues (amino acids or nucleic acids) or presence of extra residues also decreases the identity and homology/similarity. In some embodiments, the term “homology” describes a mathematically based comparison of sequence similarities which is used to identify genes with similar functions or motifs. The nucleic acid sequences described herein can be used as a “query sequence” to perform a search against public databases, for example, to identify other family members, related sequences or homologs. In some embodiments, such searches can be performed using the NBLAST and XBLAST programs (version 2.0) of Altschul, et al. (1990) J. Mol. Biol. 215:403-10. In some embodiments, BLAST nucleotide searches can be performed with the NBLAST program, score=100, word length=12 to obtain nucleotide sequences homologous to nucleic acid molecules of the invention. In some embodiments, to obtain gapped alignments for comparison purposes, Gapped BLAST can be utilized as described in Altschul et al., (1997) Nucleic Acids Res. 25(17):3389-3402. When utilizing BLAST and Gapped BLAST programs, the default parameters of the respective programs (e.g., XBLAST and BLAST) can be used (See www.ncbi.nlm.nih.gov).

[0429] Identity: As used herein, “identity” means the percentage of identical nucleotide residues at corresponding positions in two or more sequences when the sequences are aligned to maximize sequence matching, i.e., taking into account gaps and insertions. Identity can be readily calculated by known methods, including but not limited to those described in (Computational Molecular Biology, Lesk, A. M., ed., Oxford University Press, New York, 1988; Biocomputing: Informatics and Genome Projects, Smith, D. W., ed., Academic Press, New York, 1993; Computer Analysis of Sequence Data, Part I, Griffin, A. M., and Griffin, H. G., eds., Humana Press, New Jersey, 1994; Sequence Analysis in Molecular Biology, von Heinje, G., Academic Press, 1987; and Sequence Analysis Primer, Gribskov, M. and Devereux, J., eds., M Stockton Press, New York, 1991; and Carillo, H., and Lipman, D., SIAM J. Applied Math., 48: 1073 (1988). Methods to determine identity are designed to give the largest match between the sequences tested. Moreover, methods to determine identity are codified in publicly available computer programs. Computer program methods to determine identity between two sequences include, but are not limited to, the GCG program package (Devereux, J., et al., Nucleic Acids Research 12(1): 387 (1984)), BLASTP, BLASTN, and FASTA (Altschul, S. F. et al., J. Molec. Biol. 215: 403-410 (1990) and Altschul et al. Nuc. Acids Res. 25: 3389-3402 (1997)). The BLAST X program is publicly available from NCBI and other sources (BLAST Manual, Altschul, S., et al., NCBI NLM NIH Bethesda, Md. 20894; Altschul, S., et al., J. Mol. Biol. 215: 403-410 (1990). The well-known Smith Waterman algorithm can also be used to determine identity.

[0430] Heterologous: A “heterologous” region of a DNA sequence is an identifiable segment of DNA within a larger DNA sequence that is not found in association with the larger sequence in nature. Thus, when the heterologous region encodes a mammalian gene, the gene can usually be flanked by DNA that does not flank the mammalian genomic DNA in the genome of the source organism. Another example of a heterologous coding sequence is a sequence where the coding sequence itself is not found in nature (e.g., a cDNA where the genomic coding sequence contains introns or synthetic sequences having codons or motifs different than the unmodified gene). Allelic variations or naturally-occurring mutational events do not give rise to a heterologous region of DNA as defined herein.

[0431] Oligonucleotide: The term “oligonucleotide”, as used herein, refers to a polymer or oligomer of nucleotide monomers, containing any combination of nucleobases, modified nucleobases, sugars, modified sugars, phosphate bridges, or modified phosphorus atom bridges (also referred to herein as “internucleotidic linkage”, defined further herein).

[0432] Oligonucleotides can be single-stranded or double-stranded. As used herein, the term “oligonucleotide strand” encompasses a single-stranded oligonucleotide. A single-stranded oligonucleotide can have double-stranded regions and a double-stranded oligonucleotide can have single-stranded regions. Example oligonucleotides include, but are not limited to structural genes, genes including control and termination regions, self-replicating systems such as viral or plasmid DNA, single-stranded and double-stranded siRNAs and other RNA interference reagents (RNAi agents or iRNA agents), shRNA, antisense oligonucleotides, ribozymes, microRNAs, microRNA mimics, supermirs, aptamers, antimirs, antagomirs, Ul adaptors, triplex-forming oligonucleotides, G-quadruplex oligonucleotides, RNA activators, immuno-stimulatory oligonucleotides, and decoy oligonucleotides.

[0433] Double-stranded and single-stranded oligonucleotides that are effective in inducing RNA interference are also referred to as siRNA, RNAi agent, or iRNA agent, herein. In some embodiments, these RNA interference inducing oligonucleotides associate with a cytoplasmic multi-protein complex known as RNAi-induced silencing complex (RISC). In many embodiments, single-stranded and double-stranded RNAi agents are sufficiently long that they can be cleaved by an endogenous molecule, e.g., by Dicer, to produce smaller oligonucleotides that can enter the RISC machinery and participate in RISC mediated cleavage of a target sequence, e.g. a target mRNA.

[0434] Oligonucleotides of the present invention can be of various lengths. In particular embodiments, oligonucleotides can range from about 2 to about 200 nucleotides in length. In various related embodiments, oligonucleotides, single-stranded, double-stranded, and triple-stranded, can range in length from about 4 to about 10 nucleotides, from about 10 to about 50 nucleotides, from about 20 to about 50 nucleotides, from about 15 to about 30 nucleotides, from about 20 to about 30 nucleotides in length. In some embodiments, the oligonucleotide is from about 9 to about 39 nucleotides in length. In some embodiments, the oligonucleotide is at least 4 nucleotides in length. In some embodiments, the oligonucleotide is at least 5 nucleotides in length. In some embodiments, the oligonucleotide is at least 6 nucleotides in length. In some embodiments, the oligonucleotide is at least 7 nucleotides in length. In some embodiments, the oligonucleotide is at least 8 nucleotides in length. In some embodiments, the oligonucleotide is at least 9 nucleotides in length. In some embodiments, the oligonucleotide is at least 10 nucleotides in length. In some embodiments, the oligonucleotide is at least 11 nucleotides in length. In some embodiments, the oligonucleotide is at least 12 nucleotides in length. In some embodiments, the oligonucleotide is at least 15 nucleotides in length. In some embodiments, the oligonucleotide is at least 20 nucleotides in length. In some embodiments, the oligonucleotide is at least 25 nucleotides in length. In some embodiments, the oligonucleotide is at least 30 nucleotides in length. In some embodiments, the oligonucleotide is a duplex of complementary strands of at least 18 nucleotides in length. In some embodiments, the oligonucleotide is a duplex of complementary strands of at least 21 nucleotides in length. In some embodiments, a sequence of a nucleic acid or an oligonucleotide comprises or consists of a common base sequence hybridizes with a transcript of dystrophin, myostatin, Huntingtin, a myostatin receptor, ActRIIB, ActRIIA, DMPK, Malat1, SMN2, dystrophia myotonica protein kinase (DMPK), Proprotein convertase subtilisin/kexin type 9 (PCSK9), SMAD7 or KRT14 (Keratin 14). In some embodiments, a sequence of a nucleic acid or an oligonucleotide comprises or consists of a common base sequence hybridizes with a transcript of a gene related to Huntington's disease, spinal muscular atrophy, spinal muscular atrophy type 1, amyotrophic lateral sclerosis, Duchenne muscular dystrophy, myotonic dystrophy, myotonic dystrophy type 1, a genetic disease of the liver, a metabolic disease of the liver, epidermolysis bullosa simplex, a genetic disease of the skin, a genetic disease of the skin, or irritable bowel syndrome, or a genetic disease, or a metabolic disease.

[0435] Internucleotidic linkage: As used herein, the phrase “internucleotidic linkage” refers generally to the phosphorus-containing linkage between nucleotide units of an oligonucleotide, and is interchangeable with “inter-sugar linkage” and “phosphorus atom bridge,” as used above and herein. In some embodiments, an internucleotidic linkage is a phosphodiester linkage, as found in naturally occurring DNA and RNA molecules. In some embodiments, an internucleotidic linkage is a modified phosphodiester linkage. In some embodiments, an internucleotidic linkage is a “modified internucleotidic linkage” wherein each oxygen atom of the phosphodiester linkage is optionally and independently replaced by an organic or inorganic moiety. In some embodiments, such an organic or inorganic moiety is selected from but not limited to ═S, ═Se, ═NR′, —SR′, —SeR′, —N(R′)₂, B(R′)₃, —S—, —Se—, and —N(R′)—, wherein each R′ is independently as defined and described below. In some embodiments, an internucleotidic linkage is a phosphotriester linkage, phosphorothioate diester linkage

[chemical structure]

or modified phosphorothioate triester linkage. It is understood by a person of ordinary skill in the art that the internucleotidic linkage may exist as an anion or cation at a given pH due to the existence of acid or base moieties in the linkage.

[0436] Unless otherwise specified, when used with an oligonucleotide sequence, each of s, s1, s2, s3, s4, s5, s6 and s7 independently represents the following modified internucleotidic linkage as illustrated in Table 2, below.

TABLE 2
Example Modified Internucleotidic Linkage.

| Symbol | Modified Internucleotidic Linkage |
|---|---|
| s | [chemical structure] |
| s1 | [chemical structure] |
| s2 | [chemical structure] |
| s3 | [chemical structure] |
| s4 | [chemical structure] |
| s5 | [chemical structure] |
| s6 | [chemical structure] |
| s7 | [chemical structure] |
| s8 | [chemical structure] |
| s9 | [chemical structure] |
| s10 | [chemical structure] |
| s11 | [chemical structure] |
| s12 | [chemical structure] |
| s13 | [chemical structure] |
| s14 | [chemical structure] |
| s15 | [chemical structure] |
| s16 | [chemical structure] |
| s17 | [chemical structure] |
| s18 | [chemical structure] |

[0437] For instance, (Rp, Sp)-ATsCs1GA has 1) a phosphorothioate internucleotidic linkage

[chemical structure]

between T and C; and 2) a phosphorothioate triester internucleotidic linkage having the structure of

[chemical structure]

between C and G. Unless otherwise specified, the Rp/Sp designations preceding an oligonucleotide sequence describe the configurations of chiral linkage phosphorus atoms in the internucleotidic linkages sequentially from 5′ to 3′ of the oligonucleotide sequence. For instance, in (Rp, Sp)-ATsCs1GA, the phosphorus in the “s” linkage between T and C has Rp configuration and the phosphorus in “s1” linkage between C and G has Sp configuration. In some embodiments, “All-(Rp)” or “All-(Sp)” is used to indicate that all chiral linkage phosphorus atoms in oligonucleotide have the same Rp or Sp configuration, respectively. For instance, All-(Rp)-GsCsCsTsCsAsGsTsCsTsGsCsTsTsCsGsCsAsCsC (SEQ ID NO: 3) indicates that all the chiral linkage phosphorus atoms in the oligonucleotide have Rp configuration; All-(Sp)-GsCsCsTsCsAsGsTsCsTsGsCsTsTsCsGsCsAsCsC (SEQ ID NO: 4) indicates that all the chiral linkage phosphorus atoms in the oligonucleotide have Sp configuration.

[0438] Oligonucleotide type: As used herein, the phrase “oligonucleotide type” is used to define an oligonucleotide that has a particular base sequence, pattern of backbone linkages (i.e., pattern of internucleotidic linkage types, for example, phosphate, phosphorothioate, etc), pattern of backbone chiral centers (i.e. pattern of linkage phosphorus stereochemistry (Rp/Sp)), and pattern of backbone phosphorus modifications (e.g., pattern of “—XLR¹” groups in formula I). In some embodiments, oligonucleotides of a common designated “type” are structurally identical to one another.

[0439] One of skill in the art will appreciate that synthetic methods of the present invention provide for a degree of control during the synthesis of an oligonucleotide strand such that each nucleotide unit of the oligonucleotide strand can be designed and/or selected in advance to have a particular stereochemistry at the linkage phosphorus and/or a particular modification at the linkage phosphorus, and/or a particular base, and/or a particular sugar. In some embodiments, an oligonucleotide strand is designed and/or selected in advance to have a particular combination of stereocenters at the linkage phosphorus. In some embodiments, an oligonucleotide strand is designed and/or determined to have a particular combination of modifications at the linkage phosphorus. In some embodiments, an oligonucleotide strand is designed and/or selected to have a particular combination of bases. In some embodiments, an oligonucleotide strand is designed and/or selected to have a particular combination of one or more of the above structural characteristics. The present invention provides compositions comprising or consisting of a plurality of oligonucleotide molecules (e.g., chirally controlled oligonucleotide compositions). In some embodiments, all such molecules are of the same type. In some embodiments, provided compositions comprise a plurality of oligonucleotides of different types, typically in pre-determined relative amounts.

[0440] Chiral control: As used herein, “chiral control” refers to an ability to control the stereochemical designation of a chiral linkage phosphorus in a chiral internucleotidic linkage within an oligonucleotide. In some embodiments, a control is achieved through a chiral element that is absent from the sugar and base moieties of an oligonucleotide, for example, in some embodiments, a control is achieved through use of one or more chiral auxiliaries during oligonucleotide preparation as exemplified in the present disclosure. In contrast to chiral control, a person having ordinary skill in the art appreciates that conventional oligonucleotide synthesis which does not use chiral auxiliaries cannot control stereochemistry at a chiral internucleotidic linkage if such conventional oligonucleotide synthesis is used to form the chiral internucleotidic linkage.

[0441] Chirally controlled oligonucleotide composition: The terms “chirally controlled oligonucleotide composition”, “chirally controlled nucleic acid composition”, and the like, as used herein, refers to a composition that comprising a plurality of oligonucleotides (or nucleic acids) which share 1) a common base sequence, 2) a common pattern of backbone linkages, and 3) a common pattern of backbone phosphorus modifications, wherein the plurality of oligonucleotides share the same stereochemistry at one or more chiral internucleotidic linkages (chirally controlled internucleotidic linkages), and the level of the plurality of oligonucleotides in the composition is pre-determined. In some embodiments, each chiral internucleotidic linkage is a chiral controlled internucleotidic linkage, and the composition is a completely chirally controlled oligonucleotide composition. In some embodiments, not all chiral internucleotidic linkages are chiral controlled internucleotidic linkages, and the composition is a partially chirally controlled oligonucleotide composition. In some embodiments, a chirally controlled oligonucleotide composition comprises predetermined levels of individual oligonucleotide or nucleic acids types. For instance, in some embodiments a chirally controlled oligonucleotide composition comprises one oligonucleotide type. In some embodiments, a chirally controlled oligonucleotide composition comprises more than one oligonucleotide type. In some embodiments, a chirally controlled oligonucleotide composition comprises multiple oligonucleotide types.

[0442] Chirally pure: As used herein, the phrase “chirally pure” is used to describe a chirally controlled oligonucleotide composition, or a plurality of oligonucleotides, in which all of the oligonucleotides exist in a single diastereomeric form with respect to the linkage phosphorus.

[0443] Chirally uriform: As used herein, the phrase “chirally uniform” is used to describe an oligonucleotide molecule or type in which all nucleotide units have the same stereochemistry at the linkage phosphorus. For instance, an oligonucleotide whose nucleotide units all have Rp stereochemistry at the linkage phosphorus is chirally uniform. Likewise, an oligonucleotide whose nucleotide units all have Sp stereochemistry at the linkage phosphorus is chirally uniform.

[0444] Predetermined: By predetermined (or pre-determined) is meant deliberately selected, for example as opposed to randomly occurring or achieved without control. Those of ordinary skill in the art, reading the present specification, will appreciate that the present disclosure provides technologies that permit selection of particular chemistry and/or stereochemistry features to be incorporated into oligonucleotide compositions, and further permits controlled preparation of oligonucleotide compositions having such chemistry and/or stereochemistry features. Such provided compositions are “predetermined” as described herein. Compositions that may contain certain oligonucleotides because they happen to have been generated through a process that cannot be controlled to intentionally generate the particular chemistry and/or stereochemistry features is not a “predetermined” composition. In some embodiments, a predetermined composition is one that can be intentionally reproduced (e.g., through repetition of a controlled process). In some embodiments, a predetermined level of a plurality of oligonucleotides in a composition means that the absolute amount, and/or the relative amount (ratio, percentage, etc.) of the plurality of oligonucleotides in the composition is controlled.

[0445] Linkage phosphorus: As defined herein, the phrase “linkage phosphorus” is used to indicate that the particular phosphorus atom being referred to is the phosphorus atom present in the internucleotidic linkage, which phosphorus atom corresponds to the phosphorus atom of a phosphodiester of an internucleotidic linkage as occurs in naturally occurring DNA and RNA. In some embodiments, a linkage phosphorus atom is in a modified internucleotidic linkage, wherein each oxygen atom of a phosphodiester linkage is optionally and independently replaced by an organic or inorganic moiety. In some embodiments, a linkage phosphorus atom is P* of formula I. In some embodiments, a linkage phosphorus atom is chiral. In some embodiments, a chiral linkage phosphorus atom is P* of formula I.

[0446] P-modification: As used herein, the term “P-modification” refers to any modification at the linkage phosphorus other than a stereochemical modification. In some embodiments, a P-modification comprises addition, substitution, or removal of a pendant moiety covalently attached to a linkage phosphorus. In some embodiments, the “P-modification” is —X-L-R¹ wherein each of X, L and R¹ is independently as defined and described herein and below.

[0447] Blockmer: The term “blockmer,” as used herein, refers to an oligonucleotide strand whose pattern of structural features characterizing each individual nucleotide unit is characterized by the presence of at least two consecutive nucleotide units sharing a common structural feature at the internucleotidic phosphorus linkage. By common structural feature is meant common stereochemistry at the linkage phosphorus or a common modification at the linkage phosphorus. In some embodiments, the at least two consecutive nucleotide units sharing a common structure feature at the internucleotidic phosphours linkage are referred to as a “block”.

[0448] In some embodiments, a blockmer is a “stereoblockmer,” e.g., at least two consecutive nucleotide units have the same stereochemistry at the linkage phosphorus. Such at least two consecutive nucleotide units form a “stereoblock.” For instance, (Sp, Sp)-ATsCs1GA is a stereoblockmer because at least two consecutive nucleotide units, the Ts and the Cs1, have the same stereochemistry at the linkage phosphorus (both Sp). In the same oligonucleotide (Sp, Sp)-ATsCs1GA, TsCs1 forms a block, and it is a stereoblock.

[0449] In some embodiments, a blockmer is a “P-modification blockmer,” e.g., at least two consecutive nucleotide units have the same modification at the linkage phosphorus. Such at least two consecutive nucleotide units form a “P-modification block”. For instance, (Rp, Sp)-ATsCsGA is a P-modification blockmer because at least two consecutive nucleotide units, the Ts and the Cs, have the same P-modification (i.e., both are a phosphorothioate diester). In the same oligonucleotide of (Rp, Sp)-ATsCsGA, TsCs forms a block, and it is a P-modification block.

[0450] In some embodiments, a blockmer is a “linkage blockmer,” e.g., at least two consecutive nucleotide units have identical stereochemistry and identical modifications at the linkage phosphorus. At least two consecutive nucleotide units form a “linkage block”. For instance, (Rp, Rp)-ATsCsGA is a linkage blockmer because at least two consecutive nucleotide units, the Ts and the Cs, have the same stereochemistry (both Rp) and P-modification (both phosphorothioate). In the same oligonucleotide of (Rp, Rp)-ATsCsGA, TsCs forms a block, and it is a linkage block.

[0451] In some embodiments, a blockmer comprises one or more blocks independently selected from a stereoblock, a P-modification block and a linkage block. In some embodiments, a blockmer is a stereoblockmer with respect to one block, and/or a P-modification blockmer with respect to another block, and/or a linkage blockmer with respect to yet another block. For instance, (Rp, Rp, Rp, Rp, Rp, Sp, Sp, Sp)-AAsTsCsGsAs1Ts1Cs1Gs1ATCG (SEQ ID NO: 5) is a stereoblockmer with respect to the stereoblock AsTsCsGsAs1 (all Rp at linkage phosphorus) or Ts1Cs1Gs1 (all Sp at linkage phosphorus), a P-modification blockmer with respect to the P-modification block AsTsCsGs (all s linkage) or As1Ts1Cs1Gs1 (all s1 linkage), or a linkage blockmer with respect to the linkage block AsTsCsGs (all Rp at linkage phosphorus and all s linkage) or Ts1Cs1Gs1 (all Sp at linkage phosphorus and all s1 linkage).

[0452] Altmer: The term “altmer,” as used herein, refers to an oligonucleotide strand whose pattern of structural features characterizing each individual nucleotide unit is characterized in that no two consecutive nucleotide units of the oligonucleotide strand share a particular structural feature at the internucleotidic phosphorus linkage. In some embodiments, an altmer is designed such that it comprises a repeating pattern. In some embodiments, an altmer is designed such that it does not comprise a repeating pattern.

[0453] In some embodiments, an altmer is a “stereoaltmer,” e.g., no two consecutive nucleotide units have the same stereochemistry at the linkage phosphorus. For instance, (Rp, Sp, Rp, Sp, Rp, Sp, Rp, Sp, Rp, Sp Rp, Sp, Rp, Sp, Rp, Sp, Rp, Sp, Rp)-GsCsCsTsCsAsGsTsCsTsGsCsTsTsCsGsCsAsCsC (SEQ ID NO: 6).

[0454] In some embodiments, an altmer is a “P-modification altmer” e.g., no two consecutive nucleotide units have the same modification at the linkage phosphorus. For instance, All-(Sp)-CAs1GsT, in which each linkage phosphorus has a different P-modification than the others.

[0455] In some embodiments, an altmer is a “linkage altmer,” e.g., no two consecutive nucleotide units have identical stereochemistry or identical modifications at the linkage phosphorus. For instance, (Rp, Sp, Rp, Sp, Rp, Sp, Rp, Sp, Rp, Sp Rp, Sp, Rp, Sp, Rp, Sp, Rp, Sp, Rp)-GsCs1CsTs1CsAs1GsTs1CsTs1GsCs1TsTs2CsGs3CsAs4CsC (SEQ ID NO: 7).

[0456] Sequence: As used herein, the term “sequence” refers to any arrangement of molecules or atoms characteristic of a particular molecule. In some embodiments, in referencing a nucleic acid, a “sequence” refers to any of: base sequence (including length), the pattern of chemical modifications to sugar and base moieties, the pattern of backbone linkages (e.g., pattern of natural phosphate linkages, phosphorothioate linkages, phosphorothioate triester linkages, and combinations thereof), the pattern of backbone chiral centers (e.g., pattern of stereochemistry (Rp/Sp) of chiral internucleotidic linkages), and the pattern of backbone phosphorus modifications (e.g., pattern of modifications on the internucleotidic phosphorus atom, such as —S—, and -L-R¹ of formula I). In some embodiments, in referencing a nucleic acid or oligonucleotide, a “sequence” refers to the sequence of bases or base sequence. In some embodiments, in reference to a peptide or protein, a sequence refers to a sequence of amino acids.

[0457] Unimer: The term “unimer,” as used herein, refers to an oligonucleotide strand whose pattern of structural features characterizing each individual nucleotide unit is such that all nucleotide units within the strand share at least one common structural feature at the internucleotidic phosphorus linkage. By common structural feature is meant common stereochemistry at the linkage phosphorus or a common modification at the linkage phosphorus.

[0458] In some embodiments, a unimer is a “stereounimer,” e.g., all nucleotide units have the same stereochemistry at the linkage phosphorus. For instance, All-(Sp)-CsAs1GsT, in which all the linkages have Sp phosphorus.

[0459] In some embodiments, a unimer is a “P-modification unimer”, e.g., all nucleotide units have the same modification at the linkage phosphorus. For instance, (Rp, Sp, Rp, Sp, Rp, Sp, Rp, Sp, Rp, Sp Rp, Sp, Rp, Sp, Rp, Sp, Rp, Sp, Rp)-GsCsCsTsCsAsGsTsCsTsGsCsTsTsCsGsCsAsCsC (SEQ ID NO: 6), in which all the internucleotidic linkages are phosphorothioate diester.

[0460] In some embodiments, a unimer is a “linkage unimer,” e.g., all nucleotide units have the same stereochemistry and the same modifications at the linkage phosphorus. For instance, All-(Sp)-GsCsCsTsCsAsGsTsCsTsGsCsTsTsCsGsCsAsCsC (SEQ ID NO: 4), in which all the internucleotidic linkages are phosphorothioate diester having Sp linkage phosphorus.

[0461] Gapmer: As used herein, the term “gapmer” refers to an oligonucleotide strand characterized in that at least one internucleotidic phosphorus linkage of the oligonucleotide strand is a phosphate diester linkage, for example such as those found in naturally occurring DNA or RNA. In some embodiments, more than one internucleotidic phosphorus linkage of the oligonucleotide strand is a phosphate diester linkage such as those found in naturally occurring DNA or RNA. For instance, All-(Sp)-CAs1GsT, in which the internucleotidic linkage between C and A is a phosphate diester linkage.

[0462] Skipmer: As used herein, the term “skipmer” refers to a type of gapmer in which every other internucleotidic phosphorus linkage of the oligonucleotide strand is a phosphate diester linkage, for example such as those found in naturally occurring DNA or RNA, and every other internucleotidic phosphorus linkage of the oligonucleotide strand is a modified internucleotidic linkage. For instance, All-(Sp)-AsTCs1GAs2TCs3G.

[0463] Unless specified otherwise, methods and structures described herein relating to compounds and compositions also apply to pharmaceutically acceptable acid or base addition salts and stereoisomeric forms of these compounds and compositions.

### 2. Detailed Description of Certain Embodiments

[0464] Many technologies for delivering biologically active agents can suffer from an inability to target desired cells or tissues. For example, delivery of biologically active agents to tissues outside the liver remains particularly difficult. Juliano reported that, despite advances at the clinical level, effective delivery of oligonucleotides in vivo remains a major challenge, especially at extra-hepatic sites. Juliano 2016 Nucl. Acids Res. Doi: 10.1093/nar/gkw236. Lou also reported that delivery of siRNA to organs beyond the liver remains the biggest hurdle to using the technology for a host of diseases. Lou 2014 SciBX 7(48); doi:10.1038/scibx.2014.1394. In some embodiments, the present disclosure encompasses surprising findings, including that lipids can be particularly effective at delivering biologically active agents to particular cells and tissues, including cells and tissues outside the liver, including, as non-limiting examples, muscle cells and tissues.

[0465] Among other things, the present disclosure encompasses the recognition that lipids can surprisingly enable and/or promote delivery of biologically active agents to their target location(s) (e.g., cells, tissues, organs, etc.). In some embodiments, the present disclosure provides compositions comprising a biologically active agent and a lipid. In some embodiments, provided compositions and methods are particularly effective for delivering the biologically active agent therein to target locations. In some embodiments, a target location is a cell. In some embodiments, a target location is a type of cell in a tissue. In some embodiments, a target location is a tissue. In some embodiments, a target location is an organ. In some embodiments, at a target location, a biologically active agent of a provided composition is delivered into a cell, e.g., the cytoplasm, nucleus, etc.

[0466] In some embodiments, provided technologies can be utilized to effectively improve delivery of biologically active agents to their target location(s) in a subject, e.g., in a mammal or human subject, etc. In some embodiments, provided technologies provide surprising achievement of efficient and/or effective delivery of biologically active agent(s) into cells (i.e., to intracellular location(s) such as cytoplasm, nucleus, etc.) of a subject.

[0467] In some embodiments, provided technologies permit or facilitate delivery of an effective and/or desired amount of biologically active agent to its target location(s) so that, for example, a comparable or higher level of the biologically active agent is achieved at the target location(s) than is observed when the biologically active agent is administered absent the lipid, in some embodiments, even though a lower amount of the biologically active agent may be administered with the lipid than without. In some embodiments, provided technologies permit or facilitate improved distribution (i.e., increased relative level of biologically active agent at a target location(s) as compared with at a non-target location(s)) relative to an appropriate control (e.g., that level observed when the oligonucleotide is comparably administered absent the lipid). In some embodiments, provided technologies render biologically active agents that have otherwise been considered unsuitable for therapeutic use to be successfully used for treating various diseases, disorders and/or conditions.

[0468] In some embodiments, provided technologies are particularly effective at delivering biologically active agents to particular types of cells and tissues, including, but not limited to, cells and tissues outside the liver (e.g., extra-hepatic), including, but not limited to, muscle cells and tissues. In some embodiments, the present disclosure provides technologies that are surprisingly effective at delivering biologically active agents to muscle cells and tissues, e.g., of skeletal muscles, gastrocnemius, heart, quadriceps, triceps, and/or thoracic diaphragm, etc. In some embodiments, provided technologies effectively deliver a biologically active agent into cells of gastrocnemius muscle of a subject. In some embodiments, provided technologies effectively deliver a biologically active agent into cells of cardiac muscle of a subject. In some embodiments, provided technologies effectively deliver a biologically active agent into cells of quadriceps of a subject. In some embodiments, provided technologies effectively deliver a biologically active agent into cells of triceps of a subject. In some embodiments, provided technologies effectively deliver a biologically active agent into cells of thoracic diaphragm of a subject.

[0469] In some embodiments, provided oligonucleotides comprising lipid moieties provide improved delivery to muscles, e.g., gastrocnemius, triceps, heart, diaphragm, etc., compared to reference oligonucleotides, e.g., having no lipid moieties, having no lipid moieties and different stereochemistry (e.g., chirally controlled v. stereorandom, one pattern of backbone chiral centers v. another pattern of backbone chiral centers, etc.), etc. In some embodiments, provided oligonucleotides comprising lipid moieties provide improved pharmacokinetics compared to reference oligonucleotides. In some embodiments, provided oligonucleotides provides faster clearance from a system than reference oligonucleotides, which, as appreciated by a person having ordinary skill in the art, may provide lower toxicities compared to reference oligonucleotides. Example data are presented in FIGS. 31A to 31D.

[0470] In some embodiments, provided technologies are particularly effective at improving immunogenic properties of biologically active agents. In some embodiments, conjugation of a biologically active agent with a lipid can reduce the immunogenicity of the biologically active agent. In some embodiments, conjugation of a biologically active agent with a lipid can enhance the ability of the biologically active agent to antagonize an immune response. In some embodiments, conjugation of a biologically active agent with a lipid can enhance the ability of the biologically active agent to antagonize an immune response, wherein the immune response is mediated at least partially by TLR9. In some embodiments, conjugation of a lipid to an oligonucleotide improves at least one property of the oligonucleotide. In some embodiments, improved properties include increased activity (e.g., increased ability to induce desirable skipping of a deleterious exon), decreased toxicity, and/or improved distribution to a tissue. In some embodiments, a tissue is muscle tissue. In some embodiments, a tissue is skeletal muscle, gastrocnemius, triceps, heart or diaphragm. In some embodiments, improved properties include reduced hTLR9 agonist activity. In some embodiments, improved properties include hTLR9 antagonist activity. In some embodiments, improved properties include increased hTLR9 antagonist activity. In some embodiments, conjugation of oligonucleotides with lipids can provide hTLR9 antagonist activities, for example, as demonstrated in FIGS. 27 and 28.

### Lipids

[0471] In some embodiments, the present disclosure provides a composition comprising a biologically active agent and a lipid. Many lipids can be utilized in provided technologies in accordance with the present disclosure.

[0472] In some embodiments, a lipid comprises an R^{LD} group, wherein R^{LD} is an optionally substituted, C₁₀-C₈₀ saturated or partially unsaturated aliphatic group, wherein one or more methylene units are optionally and independently replaced by an optionally substituted group selected from C₁-C₆ alkylene, C₁-C₆ alkenylene, —C≡C—, a C₁-C₆ heteroaliphatic moiety, —C(R′)₂—, -Cy-, —O—, —S—, —S—S—, —N(R′)—, —C(O)—, —C(S)—, —C(NR′)—, —C(O)N(R′)—, —N(R′)C(O)N(R′)—, —N(R′)C(O)—, —N(R′)C(O)O—, —OC(O)N(R′)—, —S(O)—, —S(O)₂—, —S(O)₂N(R′)—, —N(R′)S(O)₂— —SC(O)—, —C(O)S—, —OC(O)—, and —C(O)O—, wherein: each R′ is independently —R, —C(O)R, —CO₂R, or —SO₂R, or:
[0473] two R′ are taken together with their intervening atoms to form an optionally substituted aryl, carbocyclic, heterocyclic, or heteroaryl ring;
[0474] -Cy- is an optionally substituted bivalent ring selected from carbocyclylene, arylene, heteroarylene, and heterocyclylene; and
[0475] each R is independently hydrogen, or an optionally substituted group selected from C₁-C₆ aliphatic, phenyl, carbocyclyl, aryl, heteroaryl, or heterocyclyl.

[0476] In some embodiments, a lipid comprises an R^{LD} group, wherein R^{LD} is an optionally substituted, C₁₀-C₆₀ saturated or partially unsaturated aliphatic group, wherein one or more methylene units are optionally and independently replaced by an optionally substituted group selected from C₁-C₆ alkylene, C₁-C₆ alkenylene, —C≡C—, a C₁-C₆ heteroaliphatic moiety, —C(R′)₂—, -Cy-, —O—, —S—, —S—S—, —N(R′)—, —C(O)—, —C(S)—, —C(NR′)—, —C(O)N(R′)—, —N(R′)C(O)N(R′)—, —N(R′)C(O)—, —N(R′)C(O)O—, —OC(O)N(R′)—, —S(O)—, —S(O)₂—, —S(O)₂N(R′)—, —N(R′)S(O)₂— —SC(O)—, —C(O)S—, —OC(O)—, and —C(O)O—, wherein:
[0477] each R′ is independently —R, —C(O)R, —CO₂R, or —SO₂R, or:
   [0478] two R′ are taken together with their intervening atoms to form an optionally substituted aryl, carbocyclic, heterocyclic, or heteroaryl ring;
[0479] -Cy- is an optionally substituted bivalent ring selected from carbocyclylene, arylene, heteroarylene, and heterocyclylene; and
[0480] each R is independently hydrogen, or an optionally substituted group selected from C₁-C₆ aliphatic, phenyl, carbocyclyl, aryl, heteroaryl, or heterocyclyl.

[0481] In some embodiments, a lipid comprises an R^{LD} group, wherein R^{LD} is an optionally substituted, C₁₀-C₄₀ saturated or partially unsaturated aliphatic group, wherein one or more methylene units are optionally and independently replaced by an optionally substituted group selected from C₁-C₆ alkylene, C₁-C₆ alkenylene, —C≡C—, a C₁-C₆ heteroaliphatic moiety, —C(R′)₂—, -Cy-, —O—, —S—, —S—S—, —N(R′)—, —C(O)—, —C(S)—, —C(NR′)—, —C(O)N(R′)—, —N(R′)C(O)N(R′)—, —N(R′)C(O)—, —N(R′)C(O)O—, —OC(O)N(R′)—, —S(O)—, —S(O)₂—, —S(O)₂N(R′)—, —N(R′)S(O)₂— —SC(O)—, —C(O)S—, —OC(O)—, and —C(O)O—, wherein:
[0482] each R′ is independently —R, —C(O)R, —CO₂R, or —SO₂R, or:
   [0483] two R′ are taken together with their intervening atoms to form an optionally substituted aryl, carbocyclic, heterocyclic, or heteroaryl ring;
[0484] -Cy- is an optionally substituted bivalent ring selected from carbocyclylene, arylene, heteroarylene, and heterocyclylene; and
[0485] each R is independently hydrogen, or an optionally substituted group selected from C₁-C₆ aliphatic, phenyl, carbocyclyl, aryl, heteroaryl, or heterocyclyl.

[0486] In some embodiments, R^{LD} is an optionally substituted, C₁₀-C₈₀ saturated or partially unsaturated aliphatic group, wherein one or more methylene units are optionally and independently replaced by an optionally substituted group selected from C₁-C₆ alkylene, C₁-C₆ alkenylene, —C≡C—, a C₁-C₆ heteroaliphatic moiety, —C(R′)₂—, and -Cy-. In some embodiments, R^{LD} is an optionally substituted, C₁₀-C₆₀ saturated or partially unsaturated aliphatic group, wherein one or more methylene units are optionally and independently replaced by an optionally substituted group selected from C₁-C₆ alkylene, C₁-C₆ alkenylene, —C≡C—, a C₁-C₆ heteroaliphatic moiety, —C(R′)₂—, and -Cy-. In some embodiments, R^{LD} is a hydrocarbon group consisting carbon and hydrogen atoms.

[0487] In some embodiments, R^{LD} is an optionally substituted, C₁₀-C₆₀ saturated or partially unsaturated aliphatic group, wherein one or more methylene units are optionally and independently replaced by an optionally substituted group selected from C₁-C₆ alkylene, C₁-C₆ alkenylene, —C≡C—, a C₁-C₆ heteroaliphatic moiety, —C(R′)₂—, and -Cy-. In some embodiments, R^{LD} is an optionally substituted, C₁₀-C₆₀ saturated or partially unsaturated aliphatic group, wherein one or more methylene units are optionally and independently replaced by an optionally substituted group selected from C₁-C₆ alkylene, C₁-C₆ alkenylene, —C≡C—, a C₁-C₆ heteroaliphatic moiety, —C(R′)₂—, and -Cy-. In some embodiments, R^{LD} is a hydrocarbon group consisting carbon and hydrogen atoms.

[0488] In some embodiments, R^{LD} is an optionally substituted, C₁₀-C₄₀ saturated or partially unsaturated aliphatic group, wherein one or more methylene units are optionally and independently replaced by an optionally substituted group selected from C₁-C₆ alkylene, C₁-C₆ alkenylene, —C≡C—, a C₁-C₆ heteroaliphatic moiety, —C(R′)₂—, and -Cy-. In some embodiments, R^{LD} is an optionally substituted, C₁₀-C₆₀ saturated or partially unsaturated aliphatic group, wherein one or more methylene units are optionally and independently replaced by an optionally substituted group selected from C₁-C₆ alkylene, C₁-C₆ alkenylene, —C≡C—, a C₁-C₆ heteroaliphatic moiety, —C(R′)₂—, and -Cy-. In some embodiments, R^{LD} is a hydrocarbon goup consisting carbon and hydrogen atoms.

[0489] The aliphatic group of R^{LD} can be a variety of suitable length. In some embodiments, it is C₁₀-C₈₀. In some embodiments, it is C₁₀-C₇₅. In some embodiments, it is C₁₀-C₇₀. In some embodiments, it is C₁₀-C₆₅. In some embodiments, it is C₁₀-C₆₀. In some embodiments, it is C₁₀-C₅₀. In some embodiments, it is C₁₀-C₄₀. In some embodiments, it is C₁₀-C₃₅. In some embodiments, it is C₁₀-C₃₀. In some embodiments, it is C₁₀-C₂₅. In some embodiments, it is C₁₀-C₂₄. In some embodiments, it is C₁₀-C₂₃. In some embodiments, it is C₁₀-C₂₂. In some embodiments, it is C₁₀-C₂₁. In some embodiments, it is C₁₂-C₂₂. In some embodiments, it is C₁₃-C₂₂. In some embodiments, it is C₁₄-C₂₂. In some embodiments, it is C₁₅-C₂₂. In some embodiments, it is C₁₆-C₂₂. In some embodiments, it is C₁₇-C₂₂. In some embodiments, it is C₁₈-C₂₂. In some embodiments, it is C₁₀-C₂₀. In some embodiments, the lower end of the range is C₁₀, C₁₁, C₁₂, C₁₃, C₁₄, C₁₅, C₁₆, C₁₇, or Cis. In some embodiments, the higher end of the range is C₁₈, C₁₉, C₂₀, C₂₁, C₂₂, C₂₃, C₂₄, C₂₅, C₂₆, C₂₇, C₂₈, C₂₉, C₃₀, C₃₅, C₄₀, C₄₅, C₅₀, C₅₅, or C₆₀. In some embodiments, it is C₁₀. In some embodiments, it is C₁₁. In some embodiments, it is C₁₂. In some embodiments, it is C₁₃. In some embodiments, it is C₁₄. In some embodiments, it is C₁₅. In some embodiments, it is C₁₆. In some embodiments, it is C₁₇. In some embodiments, it is C₁₈. In some embodiments, it is C₁₉. In some embodiments, it is C₂₀. In some embodiments, it is C₂₁. In some embodiments, it is C₂₂. In some embodiments, it is C₂₃. In some embodiments, it is C₂₄. In some embodiments, it is C₂₅. In some embodiments, it is C₃₀. In some embodiments, it is C₃₅. In some embodiments, it is C₄₀. In some embodiments, it is C₄₅. In some embodiments, it is C₅₀. In some embodiments, it is C₅₅. In some embodiments, it is C₆₀.

[0490] In some embodiments, a lipid comprises no more than one R^{LD} group. In some embodiments, a lipid comprises two or more R^{LD} groups.

[0491] In some embodiments, a lipid is conjugated to a biologically active agent, optionally through a linker, as a moiety comprising an R^{LD} group. In some embodiments, a lipid is conjugated to a biologically active agent, optionally through a linker, as a moiety comprising no more than one R^{LD} group. In some embodiments, a lipid is conjugated to a biologically active agent, optionally through a linker, as an R^{LD} group. In some embodiments, a lipid is conjugated to a biologically active agent, optionally through a linker, as a moiety comprising two or more R^{LD} groups.

[0492] In some embodiments, R^{LD} is an optionally substituted, C₁₀-C₄₀ saturated or partially unsaturated, aliphatic chain. In some embodiments, a lipid comprises an optionally substituted C₁₀-C₄₀ saturated or partially unsaturated, aliphatic chain.

[0493] In some embodiments, R^{LD} is an optionally substituted C₁₀-C₄₀ linear, saturated or partially unsaturated, aliphatic chain. In some embodiments, a lipid comprises an optionally substituted C₁₀-C₄₀ linear, saturated or partially unsaturated, aliphatic chain.

[0494] In some embodiments, R^{LD} is a C₁₀-C₄₀ linear, saturated or partially unsaturated, aliphatic chain, optionally substituted with one or more C₁₋₄ aliphatic groups. In some embodiments, a lipid comprises a C₁₀-C₄₀ linear, saturated or partially unsaturated, aliphatic chain, optionally substituted with one or more C₁₋₄ aliphatic groups. In some embodiments, R^{LD} is a C₁₀-C₄₀ linear, saturated or partially unsaturated, aliphatic chain, optionally substituted with one or more C₁₋₂ aliphatic groups. In some embodiments, a lipid comprises a C₁₀-C₄₀ linear, saturated or partially unsaturated, aliphatic chain, optionally substituted with one or more C₁₋₂ aliphatic groups. In some embodiments, R^{LD} is a C₁₀-C₄₀ linear, saturated or partially unsaturated, aliphatic chain, optionally substituted with one or more methyl groups. In some embodiments, a lipid comprises a C₁₀-C₄₀ linear, saturated or partially unsaturated, aliphatic chain, optionally substituted with one or more methyl groups.

[0495] In some embodiments, R^{LD} is an unsubstituted C₁₀-C₄₀ linear, saturated or partially unsaturated, aliphatic chain. In some embodiments, a lipid comprises an unsubstituted C₁₀-C₄₀ linear, saturated or partially unsaturated, aliphatic chain.

[0496] In some embodiments, a lipid comprises no more than one optionally substituted C₁₀-C₄₀ linear, saturated or partially unsaturated, aliphatic chain. In some embodiments, a lipid comprises two or more optionally substituted C₁₀-C₄₀ linear, saturated or partially unsaturated, aliphatic chain.

[0497] In some embodiments, R^{LD} is an optionally substituted, C₁₀-C₆₀ saturated or partially unsaturated, aliphatic chain. In some embodiments, a lipid comprises an optionally substituted C₁₀-C₆₀ saturated or partially unsaturated, aliphatic chain.

[0498] In some embodiments, R^{LD} is an optionally substituted C₁₀-C₆₀ linear, saturated or partially unsaturated, aliphatic chain. In some embodiments, a lipid comprises an optionally substituted C₁₀-C₆₀ linear, saturated or partially unsaturated, aliphatic chain.

[0499] In some embodiments, R^{LD} is a C₁₀-C₆₀ linear, saturated or partially unsaturated, aliphatic chain, optionally substituted with one or more C₁₋₄ aliphatic groups. In some embodiments, a lipid comprises a C₁₀-C₆₀ linear, saturated or partially unsaturated, aliphatic chain, optionally substituted with one or more C₁₋₄ aliphatic groups. In some embodiments, R^{LD} is a C₁₀-C₆₀ linear, saturated or partially unsaturated, aliphatic chain, optionally substituted with one or more C₁₋₂ aliphatic groups. In some embodiments, a lipid comprises a C₁₀-C₆₀ linear, saturated or partially unsaturated, aliphatic chain, optionally substituted with one or more C₁₋₂ aliphatic groups. In some embodiments, R^{LD} is a C₁₀-C₆₀ linear, saturated or partially unsaturated, aliphatic chain, optionally substituted with one or more methyl groups. In some embodiments, a lipid comprises a C₁₀-C₆₀ linear, saturated or partially unsaturated, aliphatic chain, optionally substituted with one or more methyl groups.

[0500] In some embodiments, R^{LD} is an unsubstituted C₁₀-C₆₀ linear, saturated or partially unsaturated, aliphatic chain. In some embodiments, a lipid comprises an unsubstituted C₁₀-C₆₀ linear, saturated or partially unsaturated, aliphatic chain.

[0501] In some embodiments, a lipid comprises no more than one optionally substituted C₁₀-C₆₀ linear, saturated or partially unsaturated, aliphatic chain. In some embodiments, a lipid comprises two or more optionally substituted C₁₀-C₆₀ linear, saturated or partially unsaturated, aliphatic chain.

[0502] In some embodiments, R^{LD} is an optionally substituted, C₁₀-C₈₀ saturated or partially unsaturated, aliphatic chain. In some embodiments, a lipid comprises an optionally substituted C₁₀-C₈₀ saturated or partially unsaturated, aliphatic chain.

[0503] In some embodiments, R^{LD} is an optionally substituted C₁₀-C₈₀ linear, saturated or partially unsaturated, aliphatic chain. In some embodiments, a lipid comprises an optionally substituted C₁₀-C₈₀ linear, saturated or partially unsaturated, aliphatic chain.

[0504] In some embodiments, R^{LD} is a C₁₀-C₈₀ linear, saturated or partially unsaturated, aliphatic chain, optionally substituted with one or more C₁₋₄ aliphatic groups. In some embodiments, a lipid comprises a C₁₀-C₈₀ linear, saturated or partially unsaturated, aliphatic chain, optionally substituted with one or more C₁₋₄ aliphatic groups. In some embodiments, R^{LD} is a C₁₀-C₈₀ linear, saturated or partially unsaturated, aliphatic chain, optionally substituted with one or more C₁₋₂ aliphatic groups. In some embodiments, a lipid comprises a C₁₀-C₈₀ linear, saturated or partially unsaturated, aliphatic chain, optionally substituted with one or more C₁₋₂ aliphatic groups. In some embodiments, R^{LD} is a C₁₀-C₈₀ linear, saturated or partially unsaturated, aliphatic chain, optionally substituted with one or more methyl groups. In some embodiments, a lipid comprises a C₁₀-C₈₀ linear, saturated or partially unsaturated, aliphatic chain, optionally substituted with one or more methyl groups.

[0505] In some embodiments, R^{LD} is an unsubstituted C₁₀-C₈₀ linear, saturated or partially unsaturated, aliphatic chain. In some embodiments, a lipid comprises an unsubstituted C₁₀-C₈₀ linear, saturated or partially unsaturated, aliphatic chain.

[0506] In some embodiments, a lipid comprises no more than one optionally substituted C₁₀-C₈₀ linear, saturated or partially unsaturated, aliphatic chain. In some embodiments, a lipid comprises two or more optionally substituted C₁₀-C₈₀ linear, saturated or partially unsaturated, aliphatic chain.

[0507] In some embodiments, R^{LD} is or comprises a C₁₀ saturated linear aliphatic chain. In some embodiments, R^{LD} is or comprises a C₁₀ partially unsaturated linear aliphatic chain. In some embodiments, R^{LD} is or comprises a C₁₁ saturated linear aliphatic chain. In some embodiments, R^{LD} is or comprises a C₁₁ partially unsaturated linear aliphatic chain. In some embodiments, R^{LD} is or comprises a C₁₂ saturated linear aliphatic chain. In some embodiments, R^{LD} is or comprises a C₁₂ partially unsaturated linear aliphatic chain. In some embodiments, R^{LD} is or comprises a C₁₃ saturated linear aliphatic chain. In some embodiments, R^{LD} is or comprises a C₁₃ partially unsaturated linear aliphatic chain. In some embodiments, R^{LD} is or comprises a C₁₄ saturated linear aliphatic chain. In some embodiments, R^{LD} is or comprises a C₁₄ partially unsaturated linear aliphatic chain. In some embodiments, R^{LD} is or comprises a C₁₅ saturated linear aliphatic chain. In some embodiments, R^{LD} is or comprises a C₁₅ partially unsaturated linear aliphatic chain. In some embodiments, R^{LD} is or comprises a C₁₆ saturated linear aliphatic chain. In some embodiments, R^{LD} is or comprises a C₁₆ partially unsaturated linear aliphatic chain. In some embodiments, R^{LD} is or comprises a C₁₇ saturated linear aliphatic chain. In some embodiments, R^{LD} is or comprises a C₁₇ partially unsaturated linear aliphatic chain. In some embodiments, R^{LD} is or comprises a C₁₈ saturated linear aliphatic chain. In some embodiments, R^{LD} is or comprises a C₁₈ partially unsaturated linear aliphatic chain. In some embodiments, R^{LD} is or comprises a C₁₉ saturated linear aliphatic chain. In some embodiments, R^{LD} is or comprises a C₁₉ partially unsaturated linear aliphatic chain. In some embodiments, R^{LD} is or comprises a C₂₀ saturated linear aliphatic chain. In some embodiments, R^{LD} is or comprises a C₂₀ partially unsaturated linear aliphatic chain. In some embodiments, R^{LD} is or comprises a C₂₁ saturated linear aliphatic chain. In some embodiments, R^{LD} is or comprises a C₂₁ partially unsaturated linear aliphatic chain. In some embodiments, R^{LD} is or comprises a C₂₂ saturated linear aliphatic chain. In some embodiments, R^{LD} is or comprises a C₂₂ partially unsaturated linear aliphatic chain. In some embodiments, R^{LD} is or comprises a C₂₃ saturated linear aliphatic chain. In some embodiments, R^{LD} is or comprises a C₂₃ partially unsaturated linear aliphatic chain. In some embodiments, R^{LD} is or comprises a C₂₄ saturated linear aliphatic chain. In some embodiments, R^{LD} is or comprises a C₂₄ partially unsaturated linear aliphatic chain. In some embodiments, R^{LD} is or comprises a C₂₅ saturated linear aliphatic chain. In some embodiments, R^{LD} is or comprises a C₂₅ partially unsaturated linear aliphatic chain. In some embodiments, R^{LD} is or comprises a C₂₆ saturated linear aliphatic chain. In some embodiments, R^{LD} is or comprises a C₂₆ partially unsaturated linear aliphatic chain. In some embodiments, R^{LD} is or comprises a C₂₇ saturated linear aliphatic chain. In some embodiments, R^{LD} is or comprises a C₂₇ partially unsaturated linear aliphatic chain. In some embodiments, R^{LD} is or comprises a C₂₈ saturated linear aliphatic chain. In some embodiments, R^{LD} is or comprises a C₂₈ partially unsaturated linear aliphatic chain. In some embodiments, R^{LD} is or comprises a C₂₉ saturated linear aliphatic chain. In some embodiments, R^{LD} is or comprises a C₂₉ partially unsaturated linear aliphatic chain. In some embodiments, R^{LD} is or comprises a C₃₀ saturated linear aliphatic chain. In some embodiments, R^{LD} is or comprises a C₃₀ partially unsaturated linear aliphatic chain.

[0508] In some embodiments, a lipid has the structure of R^{LD}—OH. In some embodiments, a lipid has the structure of R^{LD}—C(O)OH. In some embodiments, R^{LD} is

[chemical structure]

Example oligonucleotides comprising such RD groups are illustrated, e.g., in Table 4A. In some embodiments, a lipid is lauric acid, myristic acid, palmitic acid, stearic acid, oleic acid, linoleic acid, alpha-linolenic acid, gamma-linolenic acid, docosahexaenoic acid (DHA or cis-DHA), turbinaric acid, arachidonic acid, and dilinoleyl. In some embodiments, a lipid has a structure of:

[chemical structure]

Example oligonucleotides comprising conjugation with these lipids are illustrated, e.g., in Table 4.

[0509] In some embodiments, a lipid is, comprises or consists of any of: an at least partially hydrophobic or amphiphilic molecule, a phospholipid, a triglyceride, a diglyceride, a monoglyceride, a fat-soluble vitamin, a sterol, a fat and a wax. In some embodiments, a lipid is any of: a fatty acid, glycerolipid, glycerophospholipid, sphingolipid, sterol lipid, prenol lipid, saccharolipid, polyketide, and other molecule.

[0510] In some embodiments, a lipid is conjugated to a biologically active agent optionally through a linker moiety. A person having ordinary skill in the art appreciates that various technologies can be utilized to conjugate lipids to biologically active agent in accordance with the present disclosure. For example, for lipids comprising carboxyl groups, such lipids can be conjugated through the carboxyl groups.

[0511] Lipids can be conjugated to oligonucleotides optionally through linkers. Various types of linkers in the art can be utilized in accordance of the present disclosure. In some embodiments, a linker comprise a phosphate group, which can, for example, be used for conjugating lipids through chemistry similar to those employed in oligonucleotide synthesis. In some embodiments, a linker comprises an amide, ester, or ether group.

[0512] In some embodiments, a linker has the structure of -L^{LD}-. In some embodiments, L^{LD} is T^{LD} having the structure of

[chemical structure]

wherein each variable is independently as defined and described. In some embodiments, T^{LD} has the structure of formula I. In some embodiments, T^{LD} with the 5′-O— of an oligonucleotide chain form a phosphorothioate linkage (—OP(O)(S⁻)O—). In some embodiments, T^{LD} with the 5′-O— of an oligonucleotide chain form an Sp phosphorothioate linkage. In some embodiments, T^{LD} with the 5′-O— of an oligonucleotide chain form an Rp phosphorothioate linkage. In some embodiments, T^{LD} with the 5′-O— of an oligonucleotide chain form a phosphate linkage (—OP(O)(O⁻)O—). In some embodiments, T^{LD} with the 5′-O— of an oligonucleotide chain form a phosphorodithioate linkage. In some embodiments, L^{LD} is -L-T^{LD}-. In some embodiments, Y connects to -L- and —Z— is a covalent bond, so that P directly connects to a hydroxyl group of the oligonucleotide chain. In some embodiments, P connects to the 5′-end hydroxyl (5′-O—) to form a phosphate group (natural phosphate linkage) or phosphorothioate group (phosphorothioate linkage). In some embodiments, the phosphorothioate linkage is chirally controlled and can be either Rp or Sp. Unless otherwise specified, chiral centers in the linkers (e.g., P in T^{LD}) can be either stereorandom or chirally controlled, and they are not considered as part of the backbone chiral centers, e.g., for determining whether a composition is chirally controlled. In some embodiments, L^{LD} is —NH—(CH₂)₆-T^{LD}-. In some embodiments, L^{LD} is —C(O)—NH—(CH₂)₆-T^{LD}-.

[0513] In some embodiments, a linker has the structure of -L-. In some embodiments, after conjugation to oligonucleotides, a lipid forms a moiety having the structure of -L-R^{LD}wherein each of L and R^{LD} is independently as defined and described herein.

[0514] In some embodiments, -L- comprises a bivalent aliphatic chain. In some embodiments, -L- comprises a phosphate group. In some embodiments, -L- comprises a phosphorothioate group. In some embodiments, -L- has the structure of —C(O)NH—(CH₂)₆—OP(═O)(S⁻)—. In some embodiments, -L- has the structure of —C(O)NH—(CH₂)₆—OP(═O)(O⁻)—.

[0515] Lipids, optionally through linkers, can be conjugated to oligonucleotides at various suitable locations. In some embodiments, lipids are conjugated through the 5′-OH group. In some embodiments, lipids are conjugated through the 3′-OH group. In some embodiments, lipids are conjugated through one or more sugar moieties. In some embodiments, lipids are conjugated through one or more bases. In some embodiments, lipids are incorporated through one or more internucleotidic linkages. In some embodiments, an oligonucleotide may contain multiple conjugated lipids which are independently conjugated through its 5′-OH, 3′-OH, sugar moieties, base moieties and/or internucleotidic linkages.

[0516] In some embodiments, a linker is a moiety that connects two parts of a composition; as a non-limiting example, a linker physically connects a active compound to a lipid. Non-limiting examples of suitable linkers include: an uncharged linker; a charged linker; a linker comprising an alkyl; a linker comprising a phosphate; a branched linker; an unbranched linker; a linker comprising at least one cleavage group; a linker comprising at least one redox cleavage group; a linker comprising at least one phosphate-based cleavage group; a linker comprising at least one acid-cleavage group; a linker comprising at least one ester-based cleavage group; a linker comprising at least one peptide-based cleavage group.

[0517] In some embodiments, a lipid is conjugated to an active compound optionally through a linker moiety. A person having ordinary skill in the art appreciates that various technologies can be utilized to conjugate lipids to active compound in accordance with the present disclosure. For example, for lipids comprising carboxyl groups, such lipids can be conjugated through the carboxyl groups. In some embodiments, a lipid is conjugated through a linker having the structure of -L-, wherein L is as defined and described in formula I. In some embodiments, L comprises a phosphate diester or modified phosphate diester moiety. In some embodiments, a compound formed by lipid conjugation has the structure of (R^{LD}-L-)ₓ-(active compound), wherein x is 1 or an integer greater than 1, and each of R^{LD} and L is independently as defined and described herein. In some embodiments, x is 1. In some embodiments, x is greater than 1. In some embodiments, x is 1-50. In some embodiments, an active compound is an oligonucleotide. For example, in some embodiments, a conjugate has the following structures:

[chemical structure]

[0518] In some embodiments, a linker is selected from: an uncharged linker; a charged linker; a linker comprising an alkyl; a linker comprising a phosphate; a branched linker; an unbranched linker; a linker comprising at least one cleavage group; a linker comprising at least one redox cleavage group; a linker comprising at least one phosphate-based cleavage group; a linker comprising at least one acid-cleavage group; a linker comprising at least one ester-based cleavage group; and a linker comprising at least one peptide-based cleavage group. Other non-limiting examples of linkers are described herein, or detailed in FIG. 7. In some embodiments, a linker has the structure of -L^{LD}-. In some embodiments, a linker has the structure of -L-. In some embodiments, a linker comprises a linkage of formula I. In some embodiments, a linker is —C(O)NH—(CH₂)₆-L¹-, wherein L¹ has the structure of formula I as described herein. In some embodiments, a linker is —C(O)NH—(CH₂)₆—O—P(═O)(SR¹)—O—. In some embodiments, R¹ is —H, and a linker is —C(O)NH—(CH₂)₆—O—P(═O)(SH)—O—, in some conditions, e.g., certain pH, —C(O)NH—(CH₂)₆—O—P(═O)(S⁻)—O—. In some embodiments, a linker is —C(O)NH—(CH₂)₆—O—P(═S)(SR¹)—O—. In some embodiments, R¹ is —H, and a linker is —C(O)NH—(CH₂)₆—O—P(═S)(SH)—O—, in some conditions, e.g., certain pH, —C(O)NH—(CH₂)₆—O—P(═S)(S⁻)—O—. In some embodiments, a linker is —C(O)NH—(CH₂)₆—O—P(═S)(OR¹)—O—, wherein R¹ is —CH₂CH₂CN. In some embodiments, a linker is —C(O)NH—(CH₂)₆—O—P(═S)(SR′)—O—, wherein R¹ is —CH₂CH₂CN. In some embodiments, a provided oligonucleotide is coupled with a linker and forms a structure of H-linker-oligonucleotide. In some embodiments, a provided oligonucleotide is conjugated to a lipid and forms the structure of lipid-linker-oligonucleotide, e.g., R^{LD}-L^{L}D-oligonucleotide. In some embodiments, the —O— end of a linker is connected to an oligonucleotide. In some embodiments, the —O— end of a linker is connected to the 5′-end oligonucleotide (—O— being the oxygen in the 5′-OH).

[0519] In some embodiments, a linker comprises a PO (phosphodiester linkage), a PS (phosphorothioate linkage) or PS2 (phosphorodithioate linkage). A non-limiting example including a PS linker is shown below. In some embodiments, a linker is —O—P(O)(OH)—O— [phosphodiester], —O—P(O)(SH)—O— [phosphorothioate] or —O—P(S)(SH)—O— [phosphorodithioate]. In some embodiments, a linker comprises a C₆ amino moiety (—NH—(CH₂)₆—), which is illustrated below. In some embodiments, a linker comprises a C₆ amino bound to a PO, a PS, or PS2. In some embodiments, a linker is a C₆ amino bound to a PO, a PS, or PS2. In some embodiments, a linker, e.g., L^{LD} or L, is —C(O)—NH—(CH₂)₆—P(O)(OH)—. In some embodiments, a linker, e.g., L^{LD} or L, is —C(O)—NH—(CH₂)₆—P(O)(OH)—, wherein —C(O)— is connected to a lipid moiety and —P(O)(OH)— is connected to an oligonucleotide chain. In some embodiments, a linker, e.g., L^{LD} or L, is —C(O)—NH—(CH₂)₆—P(O)(OH)—, wherein —C(O)— is connected to a lipid moiety and —P(O)(OH)— is connected to the 5′-O— of an oligonucleotide chain. In some embodiments, a linker, e.g., L^{LD} or L, is —C(O)—NH—(CH₂)₆—P(O)(OH)—, wherein —C(O)— is connected to a lipid moiety and —P(O)(OH)— is connected to the 3′-O— of an oligonucleotide chain. In some embodiments, a linker, e.g., L^{LD} or L, is —C(O)—NH—(CH₂)₆—P(O)(SH)—. In some embodiments, a linker, e.g., L^{LD} or L, is —C(O)—NH—(CH₂)₆—P(O)(SH)—, wherein —C(O)— is connected to a lipid moiety and —P(O)(SH)— is connected to an oligonucleotide chain. In some embodiments, a linker, e.g., L^{LD} or L, is —C(O)—NH—(CH₂)₆—P(O)(SH)—, wherein —C(O)— is connected to a lipid moiety and —P(O)(SH)— is connected to the 5′-O— of an oligonucleotide chain. In some embodiments, a linker, e.g., L^{LD} or L, is —C(O)—NH—(CH₂)₆—P(O)(SH)—, wherein —C(O)— is connected to a lipid moiety and —P(O)(SH)— is connected to the 3′-O— of an oligonucleotide chain. In some embodiments, a linker, e.g., L^{LD} or L, is —C(O)—NH—(CH₂)₆—P(S)(SH)—. In some embodiments, a linker, e.g., L^{LD} or L, is —C(O)—NH—(CH₂)₆—P(S)(SH)—, wherein —C(O)— is connected to a lipid moiety and —P(S)(SH)— is connected to an oligonucleotide chain. In some embodiments, a linker, e.g., L^{L}D or L, is —C(O)—NH—(CH₂)₆—P(S)(SH)—, wherein —C(O)— is connected to a lipid moiety and —P(S)(SH)— is connected to the 5′-O— of an oligonucleotide chain. In some embodiments, a linker, e.g., L^{L}D or L, is —C(O)—NH—(CH₂)₆—P(S)(SH)—, wherein —C(O)— is connected to a lipid moiety and —P(S)(SH)— is connected to the 3′-O— of an oligonucleotide chain. As appreciated by a person having ordinary skill in the art, at certain pH —P(O)(OH)—, —P(O)(SH)—, —P(S)(SH)— may exist as —P(O)(O⁻)—, —P(O)(S⁻)—, —P(S)(S⁻)—, respectively. In some embodiments, a lipid moiety is R^{LD}.

[chemical structure]

[0520] Various chemistry and linkers can be used for conjugation in accordance with the present disclosure. For example, lipids, targeting components, etc. can be conjugated to oligonucleotides through linkers using chemistry as described below either on solid phase or in solution phase to prepare certain provided oligonucleotides, for example, those described in Table 4 (WV-2538, WV-2733, WV-2734, WV-2578 to WV-2588, WV-2807, WV-2808, WV-3022 to WV-3027, WV-3029 to WV-3038, WV-3084 to WV-3089, WV-3357 to WV-3366, WV-3517, WV-3520, WV-3543 to WV-3560, WV-3753, WV-3754, WV-3820, WV-3821, WV-3855, WV-3856, WV-3976, WV-3977, WV-3979, WV-3980, WV-4106, WV-4107, etc.):

[chemical structure]

[chemical structure]

[0521] Non-limiting examples of protocols for conjugation of a lipid to a biologically active agent (e.g., an oligonucleotide) using a linker are described, e.g., in the Examples.

[0522] In some embodiments, a lipid is not conjugated to a biologically active agent.

### Biologically Active Agents

[0523] Various biologically active agents can be effectively delivered to their targets in accordance with the present disclosure. In some embodiments, a biologically active agent is selected from the group consisting of: a small molecule, a peptide, a protein, a component of a CRISPR-Cas system, a carbohydrate, a therapeutic agent, a chemotherapeutic agent, a vaccine, a nucleic acid, and a lipid. In some embodiments, a nucleic acid is an oligonucleotide, an antisense oligonucleotide, an RNAi agent, a miRNA, immunomodulatory nucleic acid, an aptamer, a Piwi-interacting RNA (piRNA), a small nucleolar RNA (snoRNA), a ribozyme, a mRNA, a lncRNA, a ncRNA, an antigomir (e.g., an antagonist to a miRNA, lncRNA, ncRNA or other nucleic acid), a plasmid, a vector, or a portion thereof.

[0524] In some embodiments, a biologically active agent is a small molecule. In some embodiments, a biologically active agent is selected from biologics. In some embodiments, a biologically active agent is a protein. In some embodiments, a biologically active agent is an antibody. In some embodiments, a biologically active agent is a peptide.

[0525] In some embodiments, a biologically active agent is an oligonucleotide. In some embodiments, the present disclosure provides compositions comprising an oligonucleotide and a lipid. Among other things, such compositions are surprisingly effective at delivering oligonucleotides to their target locations, in some embodiments, delivering oligonucleotides into the cells at the target locations. In some embodiments, provided technologies are surprisingly effective at delivering oligonucleotides to muscle cells, tissues, etc. As will be appreciated by a person having ordinary skill in the art, oligonucleotides of various sequences, functions, etc., can be included in provided technologies and can be efficiently and effectively delivered to target locations, including into cells, in accordance with the present disclosure.

[0526] In some embodiments, provided technologies can be utilized to effectively improve delivery of oligonucleotides to their target location(s) in a subject, e.g., in a mammal or human subject, etc. In some embodiments, provided technologies provide surprising achievement of efficient and/or effective delivery of oligonucleotide(s) into cells (i.e., to intracellular location(s) such as cytoplasm, nucleus, etc.) of a subject.

[0527] In some embodiments, provided technologies permit or facilitate delivery of an effective and/or desired amount of oligonucleotide to its target location(s) so that, for example, a comparable or higher level of the oligonucleotide is achieved at the target location(s) than is observed when the oligonucleotide is administered absent the lipid, in some embodiments, even though a lower amount of the oligonucleotide may be administered with the lipid than without. In some embodiments, provided technologies permit or facilitate improved distribution (i.e., increased relative level of oligonucleotide at a target location(s) as compared with at a non-target location(s)) relative to an appropriate control (e.g., that level observed when the oligonucleotide is comparably administered absent the lipid). In some embodiments, provided technologies render oligonucleotides that have otherwise been considered unsuitable for therapeutic use to be successfully used for treating various diseases, disorders and/or conditions.

[0528] In some embodiments, provided technologies are particularly effective at delivering oligonucleotides to particular types of cells and tissues, including, but not limited to, cells and tissues outside the liver (e.g., extra-hepatic), including, but not limited to, muscle cells and tissues. In some embodiments, the present disclosure provides technologies that are surprisingly effective at delivering oligonucleotides to muscle cells and tissues, e.g., of gastrocnemius, heart, quadriceps, triceps, and/or thoracic diaphragm, etc. In some embodiments, provided technologies effectively deliver an oligonucleotide into cells of gastrocnemius muscle of a subject. In some embodiments, provided technologies effectively deliver an oligonucleotide into cells of cardiac muscle of a subject. In some embodiments, provided technologies effectively deliver an oligonucleotide into cells of quadriceps of a subject. In some embodiments, provided technologies effectively deliver an oligonucleotide into cells of thoracic diaphragm of a subject.

[0529] In some embodiments, a provided composition is an oligonucleotide composition comprising one ore more lipids, and a plurality of oligonucleotides, which share:
[0530] 1) a common base sequence;
[0531] 2) a common pattern of backbone linkages; and
[0532] 3) a common pattern of backbone phosphorus modifications;
   wherein one or more oligonucleotides of the plurality are independently and optionally conjugated to the lipids.

[0533] In some embodiments, a provided composition is an oligonucleotide composition comprising a plurality of oligonucleotides, which share:
[0534] 1) a common base sequence;
[0535] 2) a common pattern of backbone linkages; and
[0536] 3) a common pattern of backbone phosphorus modifications;
   wherein one or more oligonucleotides of the plurality are independently conjugated to one or more lipids.

[0537] In some embodiments, a provided composition is a chirally controlled oligonucleotide composition comprising one or more lipids, and a plurality of oligonucleotides, which share:
[0538] 1) a common base sequence;
[0539] 2) a common pattern of backbone linkages; and
[0540] 3) a common pattern of backbone phosphorus modifications;
   wherein:

[0541] the composition is chirally controlled in that the plurality of oligonucleotides share the same stereochemistry at one or more chiral internucleotidic linkages, and level of the plurality of oligonucleotides in the composition is pre-determined;

[0542] one or more oligonucleotides of the plurality are optionally and independently conjugated to one ore more lipids; and one or more oligonucleotides of the plurality are optionally and independently conjugated to a target component.

[0543] In some embodiments, a provided composition is a chirally controlled oligonucleotide composition comprising a plurality of oligonucleotides, which share:
[0544] 1) a common base sequence;
[0545] 2) a common pattern of backbone linkages; and
[0546] 3) a common pattern of backbone phosphorus modifications;
   wherein:

[0547] the composition is chirally controlled in that the plurality of oligonucleotides share the same stereochemistry at one or more chiral internucleotidic linkages, and level of the plurality of oligonucleotides in the composition is pre-determined;

[0548] one or more oligonucleotides of the plurality are independently conjugated to one or more lipids; and one or more oligonucleotides of the plurality are optionally and independently conjugated to a target component.

[0549] In some embodiments, a provided composition is a chirally controlled oligonucleotide composition comprising one or more lipids, and a plurality of oligonucleotides, which share:
[0550] 1) a common base sequence;
[0551] 2) a common pattern of backbone linkages; and
[0552] 3) a common pattern of backbone phosphorus modifications;
   wherein:

[0553] the composition is chirally controlled in that the plurality of oligonucleotides share the same stereochemistry at one or more chiral internucleotidic linkages, and level of the plurality of oligonucleotides in the composition is pre-determined;

[0554] one or more oligonucleotides of the plurality are optionally and independently conjugated to one ore more lipids; and one or more oligonucleotides of the plurality are optionally and independently conjugated to a target component.

[0555] In some embodiments, a common base sequence hybridizes with a transcript of dystrophin, myostatin, Huntingtin, a myostatin receptor, ActRIIB, ActRIIA, DMPK, Malat1, SMN2, dystrophia myotonica protein kinase (DMPK), Proprotein convertase subtilisin/kexin type 9 (PCSK9), SMAD7 or KRT14 (Keratin 14). In some embodiments, a nucleic acid or oligonucleotide or other biologically active agent is capable of reducing the level and/or activity of a mutant form of any of: dystrophin, myostatin, Huntingtin, a myostatin receptor, ActRIIB, ActRIIA, DMPK, Malat1, SMN2, dystrophia myotonica protein kinase (DMPK), Proprotein convertase subtilisin/kexin type 9 (PCSK9), SMAD7 or KRT14 (Keratin 14). In some embodiments, a nucleic acid or oligonucleotide or other biologically active agent is capable of increasing the level and/or activity of a wild-type and/or functional form of any of: dystrophin, myostatin, Huntingtin, a myostatin receptor, ActRIIB, ActRIIA, DMPK, Malat1, SMN2, dystrophia myotonica protein kinase (DMPK), Proprotein convertase subtilisin/kexin type 9 (PCSK9), SMAD7 or KRT14 (Keratin 14).

[0556] In some embodiments, stereochemistry at one or more chiral internucleotidic linkages are the same (chirally controlled). In some embodiments, two or more chiral internucleotidic linkages are chirally controlled. In some embodiments, three or more chiral internucleotidic linkages are chirally controlled. In some embodiments, four or more chiral internucleotidic linkages are chirally controlled. In some embodiments, five or more chiral internucleotidic linkages are chirally controlled. In some embodiments, six or more chiral internucleotidic linkages are chirally controlled. In some embodiments, seven or more chiral internucleotidic linkages are chirally controlled. In some embodiments, eight or more chiral internucleotidic linkages are chirally controlled. In some embodiments, nine or more chiral internucleotidic linkages are chirally controlled. In some embodiments, ten or more chiral internucleotidic linkages are chirally controlled. In some embodiments, 11 or more chiral internucleotidic linkages are chirally controlled. In some embodiments, 12 or more chiral internucleotidic linkages are chirally controlled. In some embodiments, 13 or more chiral internucleotidic linkages are chirally controlled. In some embodiments, 14 or more chiral internucleotidic linkages are chirally controlled. In some embodiments, 15 or more chiral internucleotidic linkages are chirally controlled. In some embodiments, 16 or more chiral internucleotidic linkages are chirally controlled. In some embodiments, 17 or more chiral internucleotidic linkages are chirally controlled. In some embodiments, 18 or more chiral internucleotidic linkages are chirally controlled. In some embodiments, 19 or more chiral internucleotidic linkages are chirally controlled. In some embodiments, 20 or more chiral internucleotidic linkages are chirally controlled. In some embodiments, 21 or more chiral internucleotidic linkages are chirally controlled. In some embodiments, 22 or more chiral internucleotidic linkages are chirally controlled. In some embodiments, 23 or more chiral internucleotidic linkages are chirally controlled. In some embodiments, 24 or more chiral internucleotidic linkages are chirally controlled. In some embodiments, 25 or more chiral internucleotidic linkages are chirally controlled. In some embodiments, 26 or more chiral internucleotidic linkages are chirally controlled. In some embodiments, 27 or more chiral internucleotidic linkages are chirally controlled. In some embodiments, 28 or more chiral internucleotidic linkages are chirally controlled. In some embodiments, 29 or more chiral internucleotidic linkages are chirally controlled. In some embodiments, 30 or more chiral internucleotidic linkages are chirally controlled. In some embodiments, each chiral internucleotidic linkage is chirally controlled, and oligonucleotides share a common pattern of backbone chiral centers.

[0557] In some embodiments, not all chiral internucleotidic linkages are chirally controlled, and a chirally controlled oligonucleotide composition is a partially chirally controlled oligonucleotide composition. In some embodiments, all chiral internucleotidic linkage are chirally controlled, and a chirally controlled oligonucleotide composition is a complete chirally controlled oligonucleotide composition.

[0558] In some embodiments, a chiral internucleoside linkage is a phosphorothioate. In some embodiments, a phosphorothioate can exist in a Rp or Sp conformation. Various other internucleotidic linkages, which can be chiral, are described herein.

[0559] In some embodiments, an oligonucleotide is an oligonucleotide described in Patent Application Publications US20120316224, US20140194610, US20150211006, and WO2015107425, the oligonucleotides and oligonucleotide compositions of each of which are incorporated herein by reference.

[0560] In some embodiments, the sequence of the oligonucleotide in the oligonucleotide composition comprises or consists of the sequence of any oligonucleotide described herein. In some embodiments, the sequence of the oligonucleotide in the oligonucleotide composition comprises or consists of the sequence of any oligonucleotide listed in Table 4A. In some embodiments, the oligonucleotide in the oligonucleotide composition is a splice-switching oligonucleotide. In some embodiments, the oligonucleotide in the oligonucleotide composition is capable of skipping or mediating skipping of an exon in the dystrophin gene. In some embodiments, the oligonucleotide in the oligonucleotide composition is a splice-switching oligonucleotide. In some embodiments, the oligonucleotide in the oligonucleotide composition is capable of skipping or mediating skipping of exon 51 in the dystrophin gene. In some embodiments, a biologically active agent comprises or consists of or is an oligonucleotide or oligonucleotide composition or chirally controlled oligonucleotide composition, wherein the sequence of the oligonucleotide comprises or consists of the sequence of an oligonucleotide capable of skipping or mediating skipping of exon 51, 45, 53 or 44 in the dystrophin gene. In some embodiments, the sequence of the oligonucleotide in the oligonucleotide composition comprises or consists of the sequence of WV-887, WV-896, WV-1709, WV-1710, WV-1714, WV-2095, WV-2100, WV-2106, WV-2107, WV-2108, WV-2109, WV-2223, WV-2224, WV-2225, WV-2226, WV-2227, WV-2228, WV-2229, WV-2230, WV-2438, WV-2444, WV-2445, WV-2526, WV-2527, WV-2528, WV-2529, WV-2530, WV-2531, WV-2533, WV-2578, WV-2580, WV-2587, WV-3047, WV-3152, WV-3472, WV-3473, WV-3507, WV-3508, WV-3509, WV-3510, WV-3511, WV-3512, WV-3513, WV-3514, WV-3515, WV-3545, or WV-3546.

[0561] In some embodiments, structural elements of an oligonucleotide includes any one or more of: base sequence (including length), pattern of chemical modifications to sugar and base moieties, pattern of backbone linkages (e.g., pattern of natural phosphate linkages, phosphorothioate linkages, phosphorothioate triester linkages, and combinations thereof), pattern of backbone chiral centers (e.g., pattern of stereochemistry (Rp/Sp) of chiral internucleotidic linkages), and pattern of backbone phosphorus modifications (e.g., pattern of modifications on the internucleotidic phosphorus atom, such as —S—, and -L-R¹ of formula I). In some embodiments, structural elements include lipid moieties and/or targeting components, for example, as moieties connected to sugars, bases, and/or internucleotidic linkages. In some embodiments, a structural element is base sequence. In some embodiments, a structural element is pattern of chemical modifications. In some embodiments, a structural element is pattern of sugar modifications. In some embodiments, a structural element is nucleobase modifications. In some embodiments, a structural element is pattern of lipid moieties. In some embodiments, a structural element is pattern of targeting component. In some embodiments, a structural element is a linker connecting a biologically active agent, e.g., a provided oligonucleotide, and a lipid moiety and/or a targeting component. In some embodiments, a structural element is pattern of backbone linkages. In some embodiments, a structural element is pattern of backbone chiral centers. In some embodiments, a structural element is pattern of backbone phosphorus modifications. In some embodiments, an oligonucleotide or oligonucleotide composition of any structural elements of any oligonucleotide listed herein can be used in combination with any composition and/or method described herein, including, but not limited to, any combination with any lipid described herein, any additional component described herein, or any other composition (or component thereof) or method described herein. In some embodiments, structural elements of provided oligonucleotides comprise or consist of one or more structural elements of any oligonucleotides described herein. In some embodiments, structural elements of provided oligonucleotides comprise or consist of one or more structural elements of any oligonucleotides listed in Table 4A. In some embodiments, a provided oligonucleotide in a provided oligonucleotide composition is a splice-switching oligonucleotide. In some embodiments, a provided oligonucleotide in a provided oligonucleotide composition is capable of skipping or mediating skipping of an exon in the dystrophin gene. In some embodiments, a provided oligonucleotide in a provided oligonucleotide composition is a splice-switching oligonucleotide. In some embodiments, a provided oligonucleotide in a provided oligonucleotide composition is capable of skipping or mediating skipping of exon 51 in the dystrophin gene. In some embodiments, a biologically active agent comprises or consists of or is a provided oligonucleotide, wherein structural elements of the oligonucleotide comprises or consists of one or more structural elements of an oligonucleotide capable of skipping or mediating skipping of exon 51, 45, 53 or 44 in the dystrophin gene. In some embodiments, one or more structural elements of provided oligonucleotides comprise or consist of one or more structural elements of WV-887, WV-896, WV-1709, WV-1710, WV-1714, WV-2095, WV-2100, WV-2106, WV-2107, WV-2108, WV-2109, WV-2223, WV-2224, WV-2225, WV-2226, WV-2227, WV-2228, WV-2229, WV-2230, WV-2438, WV-2444, WV-2445, WV-2526, WV-2527, WV-2528, WV-2529, WV-2530, WV-2531, WV-2533, WV-2578, WV-2580, WV-2587, WV-3047, WV-3152, WV-3472, WV-3473, WV-3507, WV-3508, WV-3509, WV-3510, WV-3511, WV-3512, WV-3513, WV-3514, WV-3515, WV-3545, or WV-3546. For example, in some embodiments, a structural element is base sequence comprising or consisting of the base sequence of WV-887; in some embodiments, a structural element is pattern of chemical modifications comprising or consisting of that of WV-887; in some embodiments, a structural element is pattern of sugar modifications comprising or consisting of that of WV-887; in some embodiments, a structural element is nucleobase modifications comprising or consisting of that of WV-887; in some embodiments, a structural element is pattern of lipid moieties comprising or consisting of that of WV-3546; in some embodiments, a structural element is pattern of targeting component comprising or consisting of that of WV-3548; in some embodiments, a structural element is a linker comprising or consisting of that of WV-3548; in some embodiments, a structural element is pattern of backbone linkages comprising or consisting of that of WV-887; in some embodiments, a structural element is pattern of backbone chiral centers comprising or consisting of that of WV-887; in some embodiments, a structural element is pattern of backbone phosphorus modifications comprising of consisting of that of WV-887. In some embodiments, the present disclosure provides a chirally controlled oligonucleotide composition, wherein one or more of the structural elements of the oligonucleotide comprise one or more structural elements of WV-2444.

[0562] In some embodiments, the present disclosure provides a chirally controlled oligonucleotide composition, wherein one or more of the structural elements of the oligonucleotide comprise one or more structural elements of WV-2445.

[0563] In some embodiments, the present disclosure provides a chirally controlled oligonucleotide composition, wherein one or more of the structural elements of the oligonucleotide comprise one or more structural elements of WV-2526.

[0564] In some embodiments, the present disclosure provides a chirally controlled oligonucleotide composition, wherein one or more of the structural elements of the oligonucleotide comprise one or more structural elements of WV-2527.

[0565] In some embodiments, the present disclosure provides a chirally controlled oligonucleotide composition, wherein one or more of the structural elements of the oligonucleotide comprise one or more structural elements of WV-2528.

[0566] In some embodiments, the present disclosure provides a chirally controlled oligonucleotide composition, wherein one or more of the structural elements of the oligonucleotide comprise one or more structural elements of WV-2530.

[0567] In some embodiments, the present disclosure provides a chirally controlled oligonucleotide composition, wherein one or more of the structural elements of the oligonucleotide comprise one or more structural elements of WV-2531.

[0568] In some embodiments, the present disclosure provides a chirally controlled oligonucleotide composition, wherein one or more of the structural elements of the oligonucleotide comprise one or more structural elements of WV-2578.

[0569] In some embodiments, the present disclosure provides a chirally controlled oligonucleotide composition, wherein one or more of the structural elements of the oligonucleotide comprise one or more structural elements of WV-2580.

[0570] In some embodiments, the present disclosure provides a chirally controlled oligonucleotide composition, wherein one or more of the structural elements of the oligonucleotide comprise one or more structural elements of WV-2587.

[0571] In some embodiments, the present disclosure provides a chirally controlled oligonucleotide composition, wherein one or more of the structural elements of the oligonucleotide comprise one or more structural elements of WV-3047.

[0572] In some embodiments, the present disclosure provides a chirally controlled oligonucleotide composition, wherein one or more of the structural elements of the oligonucleotide comprise one or more structural elements of WV-3152.

[0573] In some embodiments, the present disclosure provides a chirally controlled oligonucleotide composition, wherein one or more of the structural elements of the oligonucleotide comprise one or more structural elements of WV-3472.

[0574] In some embodiments, the present disclosure provides a chirally controlled oligonucleotide composition, wherein one or more of the structural elements of the oligonucleotide comprise one or more structural elements of WV-3473.

[0575] In some embodiments, the present disclosure provides a chirally controlled oligonucleotide composition, wherein one or more of the structural elements of the oligonucleotide comprise one or more structural elements of WV-3507.

[0576] In some embodiments, the present disclosure provides a chirally controlled oligonucleotide composition, wherein one or more of the structural elements of the oligonucleotide comprise one or more structural elements of WV-3508.

[0577] In some embodiments, the present disclosure provides a chirally controlled oligonucleotide composition, wherein one or more of the structural elements of the oligonucleotide comprise one or more structural elements of WV-3509.

[0578] In some embodiments, the present disclosure provides a chirally controlled oligonucleotide composition, wherein one or more of the structural elements of the oligonucleotide comprise one or more structural elements of WV-3510.

[0579] In some embodiments, the present disclosure provides a chirally controlled oligonucleotide composition, wherein one or more of the structural elements of the oligonucleotide comprise one or more structural elements of WV-3511.

[0580] In some embodiments, the present disclosure provides a chirally controlled oligonucleotide composition, wherein one or more of the structural elements of the oligonucleotide comprise one or more structural elements of WV-3512.

[0581] In some embodiments, the present disclosure provides a chirally controlled oligonucleotide composition, wherein one or more of the structural elements of the oligonucleotide comprise one or more structural elements of WV-3513.

[0582] In some embodiments, the present disclosure provides a chirally controlled oligonucleotide composition, wherein one or more of the structural elements of the oligonucleotide comprise one or more structural elements of WV-3514.

[0583] In some embodiments, the present disclosure provides a chirally controlled oligonucleotide composition, wherein one or more of the structural elements of the oligonucleotide comprise one or more structural elements of WV-3515.

[0584] In some embodiments, the present disclosure provides a chirally controlled oligonucleotide composition, wherein one or more of the structural elements of the oligonucleotide comprise one or more structural elements of WV-3545.

[0585] In some embodiments, the present disclosure provides a chirally controlled oligonucleotide composition, wherein one or more of the structural elements of the oligonucleotide comprise one or more structural elements of WV-3546.

[0586] In some embodiments, the present disclosure provides a chirally controlled oligonucleotide composition, wherein one or more of the structural elements of the oligonucleotide consist of one or more structural elements of WV-2444.

[0587] In some embodiments, the present disclosure provides a chirally controlled oligonucleotide composition, wherein one or more of the structural elements of the oligonucleotide consist of one or more structural elements of WV-2445.

[0588] In some embodiments, the present disclosure provides a chirally controlled oligonucleotide composition, wherein one or more of the structural elements of the oligonucleotide consist of one or more structural elements of WV-2526.

[0589] In some embodiments, the present disclosure provides a chirally controlled oligonucleotide composition, wherein one or more of the structural elements of the oligonucleotide consist of one or more structural elements of WV-2527.

[0590] In some embodiments, the present disclosure provides a chirally controlled oligonucleotide composition, wherein one or more of the structural elements of the oligonucleotide consist of one or more structural elements of WV-2528.

[0591] In some embodiments, the present disclosure provides a chirally controlled oligonucleotide composition, wherein one or more of the structural elements of the oligonucleotide consist of one or more structural elements of WV-2530.

[0592] In some embodiments, the present disclosure provides a chirally controlled oligonucleotide composition, wherein one or more of the structural elements of the oligonucleotide consist of one or more structural elements of WV-2531.

[0593] In some embodiments, the present disclosure provides a chirally controlled oligonucleotide composition, wherein one or more of the structural elements of the oligonucleotide consist of one or more structural elements of WV-2578.

[0594] In some embodiments, the present disclosure provides a chirally controlled oligonucleotide composition, wherein one or more of the structural elements of the oligonucleotide consist of one or more structural elements of WV-2580.

[0595] In some embodiments, the present disclosure provides a chirally controlled oligonucleotide composition, wherein one or more of the structural elements of the oligonucleotide consist of one or more structural elements of WV-2587.

[0596] In some embodiments, the present disclosure provides a chirally controlled oligonucleotide composition, wherein one or more of the structural elements of the oligonucleotide consist of one or more structural elements of WV-3047.

[0597] In some embodiments, the present disclosure provides a chirally controlled oligonucleotide composition, wherein one or more of the structural elements of the oligonucleotide consist of one or more structural elements of WV-3152.

[0598] In some embodiments, the present disclosure provides a chirally controlled oligonucleotide composition, wherein one or more of the structural elements of the oligonucleotide consist of one or more structural elements of WV-3472.

[0599] In some embodiments, the present disclosure provides a chirally controlled oligonucleotide composition, wherein one or more of the structural elements of the oligonucleotide consist of one or more structural elements of WV-3473.

[0600] In some embodiments, the present disclosure provides a chirally controlled oligonucleotide composition, wherein one or more of the structural elements of the oligonucleotide consist of one or more structural elements of WV-3507.

[0601] In some embodiments, the present disclosure provides a chirally controlled oligonucleotide composition, wherein one or more of the structural elements of the oligonucleotide consist of one or more structural elements of WV-3508.

[0602] In some embodiments, the present disclosure provides a chirally controlled oligonucleotide composition, wherein one or more of the structural elements of the oligonucleotide consist of one or more structural elements of WV-3509.

[0603] In some embodiments, the present disclosure provides a chirally controlled oligonucleotide composition, wherein one or more of the structural elements of the oligonucleotide consist of one or more structural elements of WV-3510.

[0604] In some embodiments, the present disclosure provides a chirally controlled oligonucleotide composition, wherein one or more of the structural elements of the oligonucleotide consist of one or more structural elements of WV-3511.

[0605] In some embodiments, the present disclosure provides a chirally controlled oligonucleotide composition, wherein one or more of the structural elements of the oligonucleotide consist of one or more structural elements of WV-3512.

[0606] In some embodiments, the present disclosure provides a chirally controlled oligonucleotide composition, wherein one or more of the structural elements of the oligonucleotide consist of one or more structural elements of WV-3513.

[0607] In some embodiments, the present disclosure provides a chirally controlled oligonucleotide composition, wherein one or more of the structural elements of the oligonucleotide consist of one or more structural elements of WV-3514.

[0608] In some embodiments, the present disclosure provides a chirally controlled oligonucleotide composition, wherein one or more of the structural elements of the oligonucleotide consist of one or more structural elements of WV-3515.

[0609] In some embodiments, the present disclosure provides a chirally controlled oligonucleotide composition, wherein one or more of the structural elements of the oligonucleotide consist of one or more structural elements of WV-3545.

[0610] In some embodiments, the present disclosure provides a chirally controlled oligonucleotide composition, wherein one or more of the structural elements of the oligonucleotide consist of one or more structural elements of WV-3546.

[0611] In some embodiments, the present disclosure provides a chirally controlled oligonucleotide composition, wherein one or more of the structural elements of the oligonucleotide comprise or consist of one or more structural elements of WV-2444, wherein the composition further comprises a lipid.

[0612] In some embodiments, the present disclosure provides a chirally controlled oligonucleotide composition, wherein one or more of the structural elements of the oligonucleotide comprise or consist of one or more structural elements of WV-2445, wherein the composition further comprises a lipid.

[0613] In some embodiments, the present disclosure provides a chirally controlled oligonucleotide composition, wherein one or more of the structural elements of the oligonucleotide comprise or consist of one or more structural elements of WV-2526, wherein the composition further comprises a lipid.

[0614] In some embodiments, the present disclosure provides a chirally controlled oligonucleotide composition, wherein one or more of the structural elements of the oligonucleotide comprise or consist of one or more structural elements of WV-2527, wherein the composition further comprises a lipid.

[0615] In some embodiments, the present disclosure provides a chirally controlled oligonucleotide composition, wherein one or more of the structural elements of the oligonucleotide comprise or consist of one or more structural elements of WV-2528, wherein the composition further comprises a lipid.

[0616] In some embodiments, the present disclosure provides a chirally controlled oligonucleotide composition, wherein one or more of the structural elements of the oligonucleotide comprise or consist of one or more structural elements of WV-2530, wherein the composition further comprises a lipid.

[0617] In some embodiments, the present disclosure provides a chirally controlled oligonucleotide composition, wherein one or more of the structural elements of the oligonucleotide comprise or consist of one or more structural elements of WV-2531, wherein the composition further comprises a lipid.

[0618] In some embodiments, the present disclosure provides a chirally controlled oligonucleotide composition, wherein one or more of the structural elements of the oligonucleotide comprise or consist of one or more structural elements of WV-2578, wherein the composition further comprises a lipid.

[0619] In some embodiments, the present disclosure provides a chirally controlled oligonucleotide composition, wherein one or more of the structural elements of the oligonucleotide comprise or consist of one or more structural elements of WV-2580, wherein the composition further comprises a lipid.

[0620] In some embodiments, the present disclosure provides a chirally controlled oligonucleotide composition, wherein one or more of the structural elements of the oligonucleotide comprise or consist of one or more structural elements of WV-2587, wherein the composition further comprises a lipid.

[0621] In some embodiments, the present disclosure provides a chirally controlled oligonucleotide composition, wherein one or more of the structural elements of the oligonucleotide comprise or consist of one or more structural elements of WV-3047, wherein the composition further comprises a lipid.

[0622] In some embodiments, the present disclosure provides a chirally controlled oligonucleotide composition, wherein one or more of the structural elements of the oligonucleotide comprise or consist of one or more structural elements of WV-3152, wherein the composition further comprises a lipid.

[0623] In some embodiments, the present disclosure provides a chirally controlled oligonucleotide composition, wherein one or more of the structural elements of the oligonucleotide comprise or consist of one or more structural elements of WV-3472, wherein the composition further comprises a lipid.

[0624] In some embodiments, the present disclosure provides a chirally controlled oligonucleotide composition, wherein one or more of the structural elements of the oligonucleotide comprise or consist of one or more structural elements of WV-3473, wherein the composition further comprises a lipid.

[0625] In some embodiments, the present disclosure provides a chirally controlled oligonucleotide composition, wherein one or more of the structural elements of the oligonucleotide comprise or consist of one or more structural elements of WV-3507, wherein the composition further comprises a lipid.

[0626] In some embodiments, the present disclosure provides a chirally controlled oligonucleotide composition, wherein one or more of the structural elements of the oligonucleotide comprise or consist of one or more structural elements of WV-3508, wherein the composition further comprises a lipid.

[0627] In some embodiments, the present disclosure provides a chirally controlled oligonucleotide composition, wherein one or more of the structural elements of the oligonucleotide comprise or consist of one or more structural elements of WV-3509, wherein the composition further comprises a lipid.

[0628] In some embodiments, the present disclosure provides a chirally controlled oligonucleotide composition, wherein one or more of the structural elements of the oligonucleotide comprise or consist of one or more structural elements of WV-3510, wherein the composition further comprises a lipid.

[0629] In some embodiments, the present disclosure provides a chirally controlled oligonucleotide composition, wherein one or more of the structural elements of the oligonucleotide comprise or consist of one or more structural elements of WV-3511, wherein the composition further comprises a lipid.

[0630] In some embodiments, the present disclosure provides a chirally controlled oligonucleotide composition, wherein one or more of the structural elements of the oligonucleotide comprise or consist of one or more structural elements of WV-3512, wherein the composition further comprises a lipid.

[0631] In some embodiments, the present disclosure provides a chirally controlled oligonucleotide composition, wherein one or more of the structural elements of the oligonucleotide comprise or consist of one or more structural elements of WV-3513, wherein the composition further comprises a lipid.

[0632] In some embodiments, the present disclosure provides a chirally controlled oligonucleotide composition, wherein one or more of the structural elements of the oligonucleotide comprise or consist of one or more structural elements of WV-3514, wherein the composition further comprises a lipid.

[0633] In some embodiments, the present disclosure provides a chirally controlled oligonucleotide composition, wherein one or more of the structural elements of the oligonucleotide comprise or consist of one or more structural elements of WV-3515, wherein the composition further comprises a lipid.

[0634] In some embodiments, the present disclosure provides chirally controlled oligonucleotide compositions of WV-887, WV-892, WV-896, WV-1714, WV-2444, WV-2445, WV-2526, WV-2527, WV-2528, WV-2530, WV-2531, WV-2578, WV-2580, WV-2587, WV-3047, WV-3152, WV-3472, WV-3473, WV-3507, WV-3508, WV-3509, WV-3510, WV-3511, WV-3512, WV-3513, WV-3514, WV-3515, WV-3545, or WV-3546. In some embodiments, the present disclosure provides a chirally controlled oligonucleotide composition of WV-887. In some embodiments, the present disclosure provides a chirally controlled oligonucleotide composition of WV-892. In some embodiments, the present disclosure provides a chirally controlled oligonucleotide composition of WV-896. In some embodiments, the present disclosure provides a chirally controlled oligonucleotide composition of WV-1714. In some embodiments, the present disclosure provides a chirally controlled oligonucleotide composition of WV-2444. In some embodiments, the present disclosure provides a chirally controlled oligonucleotide composition of WV-2445. In some embodiments, the present disclosure provides a chirally controlled oligonucleotide composition of WV-2526. In some embodiments, the present disclosure provides a chirally controlled oligonucleotide composition of WV-2527. In some embodiments, the present disclosure provides a chirally controlled oligonucleotide composition of WV-2528. In some embodiments, the present disclosure provides a chirally controlled oligonucleotide composition of WV-2530. In some embodiments, the present disclosure provides a chirally controlled oligonucleotide composition of WV-2531. In some embodiments, the present disclosure provides a chirally controlled oligonucleotide composition of WV-2578. In some embodiments, the present disclosure provides a chirally controlled oligonucleotide composition of WV-2580. In some embodiments, the present disclosure provides a chirally controlled oligonucleotide composition of WV-2587. In some embodiments, the present disclosure provides a chirally controlled oligonucleotide composition of WV-3047. In some embodiments, the present disclosure provides a chirally controlled oligonucleotide composition of WV-3152. In some embodiments, the present disclosure provides a chirally controlled oligonucleotide composition of WV-3472. In some embodiments, the present disclosure provides a chirally controlled oligonucleotide composition of WV-3473. In some embodiments, the present disclosure provides a chirally controlled oligonucleotide composition of WV-3507. In some embodiments, the present disclosure provides a chirally controlled oligonucleotide composition of WV-3508. In some embodiments, the present disclosure provides a chirally controlled oligonucleotide composition of WV-3509. In some embodiments, the present disclosure provides a chirally controlled oligonucleotide composition of WV-3510. In some embodiments, the present disclosure provides a chirally controlled oligonucleotide composition of WV-3511. In some embodiments, the present disclosure provides a chirally controlled oligonucleotide composition of WV-3512. In some embodiments, the present disclosure provides a chirally controlled oligonucleotide composition of WV-3513. In some embodiments, the present disclosure provides a chirally controlled oligonucleotide composition of WV-3514. In some embodiments, the present disclosure provides a chirally controlled oligonucleotide composition of WV-3515. In some embodiments, the present disclosure provides a chirally controlled oligonucleotide composition of WV-3545. In some embodiments, the present disclosure provides a chirally controlled oligonucleotide composition of WV-3546. As readily appreciated by one skilled in the art, such chirally controlled oligonucleotide compositions comprise predetermined levels of WV-887, WV-892, WV-896, WV-1714, WV-2444, WV-2445, WV-2526, WV-2527, WV-2528, WV-2530, WV-2531, WV-2578, WV-2580, WV-2587, WV-3047, WV-3152, WV-3472, WV-3473, WV-3507, WV-3508, WV-3509, WV-3510, WV-3511, WV-3512, WV-3513, WV-3514, WV-3515, WV-3545, or WV-3546.

[0635] In some embodiments, a lipid is a fatty acid. In some embodiments, an oligonucleotide is conjugated to a fatty acid. In some embodiments, a fatty acid comprises 10, 11, 12, 13, 14, 15, 16, 17, 18, 19, 20, 21, 22, 23, 24, 25, 26, 27, 28, 29, 30 or more carbon atoms. In some embodiments, a fatty acid comprises 10 or more carbon atoms. In some embodiments, a fatty acid comprises 11 or more carbon atoms. In some embodiments, a fatty acid comprises 12 or more carbon atoms. In some embodiments, a fatty acid comprises 13 or more carbon atoms. In some embodiments, a fatty acid comprises 14 or more carbon atoms. In some embodiments, a fatty acid comprises 15 or more carbon atoms. In some embodiments, a fatty acid comprises 16 or more carbon atoms. In some embodiments, a fatty acid comprises 17 or more carbon atoms. In some embodiments, a fatty acid comprises 18 or more carbon atoms. In some embodiments, a fatty acid comprises 19 or more carbon atoms. In some embodiments, a fatty acid comprises 20 or more carbon atoms. In some embodiments, a fatty acid comprises 21 or more carbon atoms. In some embodiments, a fatty acid comprises 22 or more carbon atoms. In some embodiments, a fatty acid comprises 23 or more carbon atoms. In some embodiments, a fatty acid comprises 24 or more carbon atoms. In some embodiments, a fatty acid comprises 25 or more carbon atoms. In some embodiments, a fatty acid comprises 26 or more carbon atoms. In some embodiments, a fatty acid comprises 27 or more carbon atoms. In some embodiments, a fatty acid comprises 28 or more carbon atoms. In some embodiments, a fatty acid comprises 29 or more carbon atoms. In some embodiments, a fatty acid comprises 30 or more carbon atoms.

[0636] In some embodiments, a lipid is stearic acid or turbinaric acid. In some embodiments, a lipid is stearic acid. In some embodiments, a lipid is turbinaric acid.

[0637] In some embodiments, a provided oligonucleotide is no more than 25 bases long. In some embodiments, a provided oligonucleotide is no more than 30 bases long. In some embodiments, a provided oligonucleotide is no more than 35 bases long. In some embodiments, a provided oligonucleotide is no more than 40 bases long. In some embodiments, a provided oligonucleotide is no more than 45 bases long. In some embodiments, a provided oligonucleotide is no more than 50 bases long. In some embodiments, a provided oligonucleotide is no more than 55 bases long. In some embodiments, the oligonucleotide is no more than 60 bases long.

[0638] In some embodiments, an oligonucleotide comprises one or more chiral internucleotidic linkages. In some embodiments, for oligonucleotides comprising one or more chiral internucleotidic linkages, a provided composition is a stereorandom composition of such oligonucleotides in that stereochemistry of each of the chiral internucleotidic linkages is not controlled. In some embodiments, a stereorandom composition is prepared by oligonucleotide synthesis without dedicated efforts e.g., through chiral auxiliaries, etc. to control the stereochemistry of each chiral internucleotidic linkages. In some embodiments, for oligonucleotides comprising one or more chiral internucleotidic linkages, a provided composition is a chirally controlled oligonucleotide composition of such oligonucleotides in that stereochemistry of at least one of the chiral internucleotidic linkages is controlled. In some embodiments, stereochemistry of each of the chiral internucleotidic linkages is independently controlled, and a provided composition is a completely chirally controlled oligonucleotide composition. In some embodiments, stereochemistry of one or more chiral internucleotidic linkages is controlled (chiral controlled internucleotidic linkages) while stereochemistry of one or more chiral internucleotidic linkages is not controlled (stereorandom/non-chirally controlled internucleotidic linkages), and a provided composition is a partially chirally controlled oligonucleotide composition. In some embodiments, a chirally controlled oligonucleotide composition can be prepared by oligonucleotide synthesis comprising stereoselective formation of one or more or all chiral internucleotidic linkages using, for example, technologies described in Patent Application Publications US20120316224, US20140194610, US20150211006, and WO2015107425, the technologies of each of which are incorporated herein by reference. In some embodiments, a provided composition comprises a chirally controlled oligonucleotide composition described in Patent Application Publications US20120316224, US20140194610, US20150211006, and WO2015107425, the chirally controlled oligonucleotide compositions of each of which are incorporated herein by reference, and a lipid. In some embodiments, a lipid is conjugated to oligonucleotides comprising stereochemically controlled internucleotidic linkages.

[0639] In some embodiments, the present disclosure provides an oligonucleotide composition comprising a lipid, and a first plurality of oligonucleotides which have a common base sequence, and comprise one or more modified sugar moieties, one or more natural phosphate linkages, or combinations thereof. In some embodiments, the present disclosure provides a lipid, and an oligonucleotide composition comprising a first plurality of oligonucleotides which have a common base sequence, comprise one or more modified internucleotidic linkages, and comprise one or more modified sugar moieties, one or more natural phosphate linkages, or combinations thereof. In some embodiments, oligonucleotides of a first plurality have a wing-core-wing structure. In some embodiments, each wing region independently comprises one or more natural phosphate linkages and optionally one or more modified internucleotidic linkages, and the core comprises one or more modified internucleotidic linkages and optionally one or more natural phosphate linkages. In some embodiments, each wing region independently comprises one or more natural phosphate linkages and one or more modified internucleotidic linkages, and the core comprises one or more modified internucleotidic linkages and no natural phosphate linkages. In some embodiments, a wing comprises modified sugar moieties. In some embodiments, a modified internucleotidic linkage is phosphorothioate. In some embodiments, a modified internucleotidic linkage is substituted phosphorothioate. In some embodiments, a modified internucleotidic linkage has the structure of formula I described in this disclosure. In some embodiments, a modified sugar moiety is 2′-modified. In some embodiments, a 2′-modification is 2′-OR¹. In some embodiments, a 2′-modification is 2′-R¹.

[0640] In some embodiments, a wing comprises at least 3 2′-F modifications. In some embodiments, a wing comprises at least 4 2′-F modifications. In some embodiments, a wing comprises at least 5 2′-F modifications. In some embodiments, a wing comprises at least 6 2′-F modifications. In some embodiments, a core comprising any two or more of: a 2′-F modification, a 2′-OMe modification, or 2′-OH. In some embodiments, a core comprises at least 1 2′-OMe modification. In some embodiments, a core comprises at least 2 2′-OMe modifications. In some embodiments, a core comprises at least 3 2′-OMe modifications. In some embodiments, a core comprises at least 2 2′-OMe modifications. In some embodiments, a core comprises at least 4 2′-OMe modifications. In some embodiments, a core comprises at least 1 2′-F modification. In some embodiments, a core comprises at least 2 2′-F modifications. In some embodiments, a core comprises at least 3 2′-F modifications. In some embodiments, a core comprises at least 2 2′-F modifications. In some embodiments, a core comprises at least 4 2′-F modifications. In some embodiments, a core comprises at least 1 2′-F modification and at least 1 2′-OMe modification. In some embodiments, a core comprises at least 1 2′-F modification and at least 2 2′-OMe modifications. In some embodiments, a core comprises at least 2 2′-F modifications and at least 1 2′-OMe modification. In some embodiments, a core comprises at least 2 2′-F modifications and at least 2 2′-OMe modifications. In some embodiments, the 2′-F modifications in the core and/or wing are contiguous or non-contiguous. In some embodiments, the 2′-OMe modifications in the core and/or wing are contiguous or non-contiguous. In some embodiments, the 2′-OH in the core and/or wing are contiguous or non-contiguous.

[0641] In some embodiments, each wing comprises at least one chiral internucleotidic linkage and at least one natural phosphate linkage. In some embodiments, each wing comprises at least one modified sugar moiety. In some embodiments, each wing sugar moiety is modified. In some embodiments, a wing sugar moiety is modified by a modification that is absent from the core region. In some embodiments, a wing region only has modified internucleotidic linkages at one or both of its ends. In some embodiments, a wing region only has a modified internucleotidic linkage at its 5′-end. In some embodiments, a wing region only has a modified internucleotidic linkage at its 3′-end. In some embodiments, a wing region only has modified internucleotidic linkages at its 5′- and 3′-ends. In some embodiments, a wing is to the 5′-end of a core, and the wing only has a modified internucleotidic linkage at its 5′-end. In some embodiments, a wing is to the 5′-end of a core, and the wing only has a modified internucleotidic linkage at its 3′-end. In some embodiments, a wing is to the 5′-end of a core, and the wing only has modified internucleotidic linkages at both its 5′- and 3′-ends. In some embodiments, a wing is to the 3′-end of a core, and the wing only has a modified internucleotidic linkage at its 5′-end. In some embodiments, a wing is to the 3′-end of a core, and the wing only has a modified internucleotidic linkage at its 3′-end. In some embodiments, a wing is to the 3′-end of a core, and the wing only has modified internucleotidic linkages at both its 5′- and 3′-ends.

[0642] In some embodiments, a wing comprises at least 4 phosphorothioates. In some embodiments, a wing comprises at least 5 phosphorothioates. In some embodiments, a wing comprises at least 6 phosphorothioates. In some embodiments, a core comprises at least 2 phosphorothioates. In some embodiments, a core comprises at least 3 phosphorothioates. In some embodiments, a core comprises at least 4 phosphorothioates. In some embodiments, a core comprises at least 5 phosphorothioates. In some embodiments, a core comprises at least 6 phosphorothioates. In some embodiments, a core comprises at least 2 phosphodiesters. In some embodiments, a core comprises at least 3 phosphodiesters. In some embodiments, a core comprises at least 4 phosphodiesters. In some embodiments, a core comprises at least 5 phosphodiesters. In some embodiments, a core comprises at least 6 phosphodiesters. In some embodiments, a core comprises at least 1 phosphodiester and at least 1 phosphorothioate. In some embodiments, a core comprises at least 1 phosphodiesters and at least 2 phosphorothioates. In some embodiments, a core comprises at least 2 phosphodiesters and at least 1 phosphorothioates. In some embodiments, a core comprises at least 2 phosphodiesters and at least 2 phosphorothioates. In some embodiments, a core comprises at least 2 phosphodiesters and at least 3 phosphorothioates. In some embodiments, a core comprises at least 3 phosphodiesters and at least 2 phosphorothioates. In some embodiments, a core comprises at least 3 phosphodiesters and at least 3 phosphorothioates. In some embodiments, the phosphodiesters in the core and/or one or both wings are optionally contiguous or not contiguous. In some embodiments, such provided compositions have lower toxicity. In some embodiments, provided compositions have lower complement activation.

[0643] In some embodiments, a common base sequence hybridizes with a transcript of dystrophin, myostatin, Huntingtin, a myostatin receptor, ActRIIB, ActRIIA, DMPK, Malat1, SMN2, dystrophia myotonica protein kinase (DMPK), Proprotein convertase subtilisin/kexin type 9 (PCSK9), SMAD7 or KRT14 (Keratin 14). In some embodiments, a nucleic acid or oligonucleotide or other biologically active agent is capable of reducing the level and/or activity of a mutant form of any of: dystrophin, myostatin, Huntingtin, a myostatin receptor, ActRIIB, ActRIIA, DMPK, Malat1, SMN2, dystrophia myotonica protein kinase (DMPK), Proprotein convertase subtilisin/kexin type 9 (PCSK9), SMAD7 or KRT14 (Keratin 14). In some embodiments, a nucleic acid or oligonucleotide or other biologically active agent is capable of increasing the level and/or activity of a wild-type and/or functional form of any of: dystrophin, myostatin, Huntingtin, a myostatin receptor, ActRIIB, ActRIIA, DMPK, Malat1, SMN2, dystrophia myotonica protein kinase (DMPK), Proprotein convertase subtilisin/kexin type 9 (PCSK9), SMAD7 or KRT14 (Keratin 14).

[0644] In some embodiments, provided compositions is a chirally controlled oligonucleotide composition comprising a lipid, which is optionally conjugated with oligonucleotides. In some embodiments, a provided oligonucleotide composition comprising a first plurality of oligonucleotides is chirally controlled, and oligonucleotides of the first plurality comprise a combination of 2′-modification of one or more sugar moieties, one or more natural phosphate linkages, and one or more chiral internucleotidic linkages. In some embodiments, a provided oligonucleotide composition comprising a first plurality of oligonucleotides is chirally controlled, and oligonucleotides of the first plurality comprise a combination of 2′-modification of one or more sugar moieties, one or more natural phosphate linkages, one or more chiral internucleotidic linkages, wherein the 5′- and/or the 3′-end internucleotidic linkages are chiral. In some embodiments, both the 5′- and the 3′-end internucleotidic linkages are chiral. In some embodiments, both the 5′- and the 3′-end internucleotidic linkages are chiral and Sp. In some embodiments, a provided oligonucleotide composition comprising a first plurality of oligonucleotides is chirally controlled, and oligonucleotides of the first plurality comprise a combination of 2′-modification of one or more sugar moieties, one or more natural phosphate linkages, one or more chiral internucleotidic linkages, and a stereochemistry pattern of (Rp)n(Sp)m, (Np)t(Rp)n(Sp)m, or (Sp)t(Rp)n(Sp)m, wherein m>2. In some embodiments, a chiral internucleotidic linkage has the structure of formula I. In some embodiments, a chiral internucleotidic linkage is a phosphorothioate linkage. In some embodiments, a chiral internucleotidic linkage is a substituted phosphorothioate linkage. In some embodiments, oligonucleotides of the first plurality are optionally and independently conjugated to a lipid.

[0645] In some embodiments, provided oligonucleotides in provided technologies comprise a wing region and a core region. In some embodiments, provided oligonucleotides have a wing-core-wing structure, wherein the core region comprises one or more sugar moieties and/or internucleotidic linkages not in the wing regions. In some embodiments, provided oligonucleotides have a wing-core-wing structure, wherein the core region comprises one or more sugar moieties and internucleotidic linkages not in the wing regions. In some embodiments, provided oligonucleotides have a wing-core-wing structure, wherein the core region comprises one or more sugar moieties not in the wing regions. In some embodiments, provided oligonucleotides have a wing-core-wing structure, wherein the core region comprises one or more internucleotidic linkages not in the wing regions. In some embodiments, a core region comprises a modified sugar moiety. In some embodiments, each sugar moiety in a core region is modified. Example sugar modifications are widely known in the art including but not limited to those described in this disclosure. In some embodiments, each wing region comprises no modified sugar moieties. In some embodiments, a core region comprises one or more natural phosphate linkages. In some embodiments, each internucleotidic linkage following a core nucleoside is natural phosphate linkage. In some embodiments, a wing comprises one or more modified internucleotidic linkages. In some embodiments, each internucleotidic linkage following a core nucleoside is a modified internucleotidic linkage.

[0646] In some embodiments, provided oligonucleotides are blockmers. In some embodiments, provided oligonucleotide are altmers. In some embodiments, provided oligonucleotides are altmers comprising alternating blocks. In some embodiments, a blockmer or an altmer can be defined by chemical modifications (including presence or absence), e.g., base modifications, sugar modification, internucleotidic linkage modifications, stereochemistry, etc.

[0647] In some embodiments, provided oligonucleotides comprise blocks comprising different internucleotidic linkages. In some embodiments, provided oligonucleotides comprise blocks comprising modified internucleotidic linkages and natural phosphate linkages. In some embodiments, provided oligonucleotides comprise blocks comprising different modified internucleotidic linkages. In some embodiments, provided oligonucleotides comprise alternating blocks comprising different internucleotidic linkages. In some embodiments, provided oligonucleotides comprise alternating blocks comprising modified internucleotidic linkages and natural phosphate linkages. In some embodiments, provided oligonucleotides comprise alternating blocks comprising different modified internucleotidic linkages. In some embodiments, a block comprising modified internucleotidic linkages have pattern of backbone chiral centers as described herein. In some embodiments, each block comprising modified internucleotidic linkages has the same pattern of backbone chiral centers. In some embodiments, blocks comprising modified internucleotidic linkages have different patterns of backbone chiral centers. In some embodiments, blocks comprising modified internucleotidic linkages have different length and/or modifications. In some embodiments, blocks comprising modified internucleotidic linkages have the same length and/or modifications. In some embodiments, blocks comprising modified internucleotidic linkages have the same length. In some embodiments, blocks comprising modified internucleotidic linkages have the same internucleotidic linkages. In some embodiments, provided oligonucleotides comprise a first block at the 5′-end (5′-block), and a second block at the 3′-end (3′-block), each of which independently comprise one or more modified internucleotidic linkages. In some embodiments, each of the 5′- and 3′-blocks independently comprises 2, 3, 4, 5, 6, 7, 8, 9, 10, 11, 12, 13, 14, 15, 16, 17, 18, 19, 20 or more modified internucleotidic linkages. In some embodiments, a 5′-block comprises 4 or more modified internucleotidic linkages. In some embodiments, a 5′-block comprises 5 or more modified internucleotidic linkages. In some embodiments, a 5′-block comprises 6 or more modified internucleotidic linkages. In some embodiments, a 5′-block comprises 7 or more modified internucleotidic linkages. In some embodiments, a 3′-block comprises 4 or more modified internucleotidic linkages. In some embodiments, a 3′-block comprises 5 or more modified internucleotidic linkages. In some embodiments, a 3′-block comprises 6 or more modified internucleotidic linkages. In some embodiments, a 3′-block comprises 7 or more modified internucleotidic linkages. In some embodiments, each of the 5′- and 3′-blocks independently comprises at least 4 modified internucleotidic linkages. In some embodiments, each of the 5′- and 3′-blocks independently comprises at least 5 modified internucleotidic linkages. In some embodiments, each of the 5′- and 3′-blocks independently comprises at least 6 modified internucleotidic linkages. In some embodiments, each of the 5′- and 3′-blocks independently comprises at least 7 modified internucleotidic linkages. In some embodiments, modified internucleotidic linkages within a block are consecutive. In some embodiments, each linkage of the 5′-block is independently a modified internucleotidic linkage. In some embodiments, each linkage of the 5′-block is independently a phosphorothioate linkage. In some embodiments, each linkage of the 5′-block is independently chirally controlled. In some embodiments, each linkage of the 5′-block is Sp. In some embodiments, each linkage of the 3′-block is independently a modified internucleotidic linkage. In some embodiments, each linkage of the 3′-block is independently a phosphorothioate linkage. In some embodiments, each linkage of the 3′-block is independently chirally controlled. In some embodiments, each linkage of the 3′-block is Sp.

[0648] In some embodiments, provided oligonucleotides comprise blocks comprising sugar modifications. In some embodiments, provided oligonucleotides comprise one or more blocks comprising one or more 2′-F modifications (2′-F blocks). In some embodiments, provided oligonucleotides comprise blocks comprising consecutive 2′-F modifications. In some embodiments, a block comprises 2, 3, 4, 5, 6, 7, 8, 9, 10, 11, 12, 13, 14, 15, 16, 17, 18, 19, 20 or more consecutive 2′-F modifications. In some embodiments, a block comprises 4 or more 2′-F modifications. In some embodiments, a block comprises 5 or more 2′-F modifications. In some embodiments, a block comprises 6 or more 2′-F modifications. In some embodiments, a block comprises 7 or more 2′-F modifications. In some embodiments, provided oligonucleotides comprises one or more blocks comprising one or more 2′-OR¹ modifications (2′-OR¹ blocks). In some embodiments, provided oligonucleotides comprise both 2′-F and 2′-OR¹ blocks. In some embodiments, provided oligonucleotides comprise alternating 2′-F and 2′-OR¹ blocks. In some embodiments, provided oligonucleotides comprise a first 2′-F block at the 5′-end, and a second 2′-F block at the 3′-end, each of which independently comprises 2, 3, 4, 5, 6, 7, 8, 9, 10, 11, 12, 13, 14, 15, 16, 17, 18, 19, 20 or more consecutive 2′-F modifications; in some embodiments, each of which independently comprises 4 or more 2′-F modifications; in some embodiments, each of which independently comprises 5 or more 2′-F modifications; in some embodiments, each of which independently comprises 6 or more 2′-F modifications; in some embodiments, each of which independently comprises 7 or more 2′-F modifications. In some embodiments, provided oligonucleotides comprise a 5′-block wherein each sugar moiety of the 5′-block comprises a 2′-F modification. In some embodiments, provided oligonucleotides comprise a 3′-block wherein each sugar moiety of the 3′-block comprises a 2′-F modification. In some embodiments, such provided oligonucleotides comprise one or more 2′-OR¹ blocks, and optionally one or more 2′-F blocks, between the 5′ and 3′ 2′-F blocks. In some embodiments, such provided oligonucleotides comprise one or more 2′-OR¹ blocks, and one or more 2′-F blocks, between the 5′ and 3′ 2′-F blocks (e.g., WV-3407, WV-3408, etc.).

[0649] In some embodiments, provided oligonucleotides comprise one or more 2′-F modified sugar moieties whose 3′-internucleotidic linkages are modified internucleotidic linkages. In some embodiments, a modified internucleotidic linkage is phosphorothioate. In some embodiments, a modified internucleotidic linkage is chirally controlled and is Rp. In some embodiments, a modified internucleotidic linkage is chirally controlled and is Sp. In some embodiments, provided oligonucleotides comprise one or more 2′-OR¹ modified sugar moieties whose 3′-internucleotidic linkages are natural phosphate linkages.

[0650] In some embodiments, a block is a stereochemistry block. In some embodiments, a block is an Rp block in that each internucleotidic linkage of the block is Rp. In some embodiments, a 5′-block is an Rp block. In some embodiments, a 3′-block is an Rp block. In some embodiments, a block is an Sp block in that each internucleotidic linkage of the block is Sp. In some embodiments, a 5′-block is an Sp block. In some embodiments, a 3′-block is an Sp block. In some embodiments, provided oligonucleotides comprise both Rp and Sp blocks. In some embodiments, provided oligonucleotides comprise one or more Rp but no Sp blocks. In some embodiments, provided oligonucleotides comprise one or more Sp but no Rp blocks. In some embodiments, provided oligonucleotides comprise one or more PO blocks wherein each internucleotidic linkage in a natural phosphate linkage.

[0651] In some embodiments, a 5′-block is an Sp block wherein each sugar moiety comprises a 2′-F modification. In some embodiments, a 5′-block is an Sp block wherein each of internucleotidic linkage is a modified internucleotidic linkage and each sugar moiety comprises a 2′-F modification. In some embodiments, a 5′-block is an Sp block wherein each of internucleotidic linkage is a phosphorothioate linkage and each sugar moiety comprises a 2′-F modification. In some embodiments, a 5′-block comprises 4 or more nucleoside units. In some embodiments, a 5′-block comprises 5 or more nucleoside units. In some embodiments, a 5′-block comprises 6 or more nucleoside units. In some embodiments, a 5′-block comprises 7 or more nucleoside units. In some embodiments, a 3′-block is an Sp block wherein each sugar moiety comprises a 2′-F modification. In some embodiments, a 3′-block is an Sp block wherein each of internucleotidic linkage is a modified internucleotidic linkage and each sugar moiety comprises a 2′-F modification. In some embodiments, a 3′-block is an Sp block wherein each of internucleotidic linkage is a phosphorothioate linkage and each sugar moiety comprises a 2′-F modification. In some embodiments, a 3′-block comprises 4 or more nucleoside units. In some embodiments, a 3′-block comprises 5 or more nucleoside units. In some embodiments, a 3′-block comprises 6 or more nucleoside units. In some embodiments, a 3′-block comprises 7 or more nucleoside units.

[0652] In some embodiments, a type of nucleoside in a region or an oligonucleotide is followed by a specific type of internucleotidic linkage, e.g., natural phosphate linkage, modified internucleotidic linkage, Rp chiral internucleotidic linkage, Sp chiral internucleotidic linkage, etc. In some embodiments, A is followed by Sp. In some embodiments, A is followed by Rp. In some embodiments, A is followed by natural phosphate linkage (PO). In some embodiments, U is followed by Sp. In some embodiments, U is followed by Rp. In some embodiments, U is followed by natural phosphate linkage (PO). In some embodiments, C is followed by Sp. In some embodiments, C is followed by Rp. In some embodiments, C is followed by natural phosphate linkage (PO). In some embodiments, G is followed by Sp. In some embodiments, G is followed by Rp. In some embodiments, G is followed by natural phosphate linkage (PO). In some embodiments, C and U are followed by Sp. In some embodiments, C and U are followed by Rp. In some embodiments, C and U are followed by natural phosphate linkage (PO). In some embodiments, A and G are followed by Sp. In some embodiments, A and G are followed by Rp. In some embodiments, A and G are followed by natural phosphate linkage (PO).

[0653] In some embodiments, provided oligonucleotides comprise alternating blocks comprising modified sugar moieties and unmodified sugar moieties. In some embodiments, modified sugar moieties comprise 2′-modifications. In some embodiments, provided oligonucleotides comprise alternating 2′-OMe modified sugar moieties and unmodified sugar moieties. For examples, see WV-1112, WV-1113, etc.

[0654] In some embodiments, provided oligonucleotides comprise alternating blocks comprising different modified sugar moieties and/or unmodified sugar moieties. In some embodiments, provided oligonucleotides comprise alternating blocks comprising different modified sugar moieties and unmodified sugar moieties. In some embodiments, provided oligonucleotides comprise alternating blocks comprising different modified sugar moieties. In some embodiments, provided oligonucleotides comprise alternating blocks comprising different modified sugar moieties, wherein the modified sugar moieties comprise different 2′-modifications. For example, in some embodiments, provided oligonucleotide comprises alternating blocks comprising 2′-OMe and 2′-F, respectively. For examples, see WV-1712, WV1713, WV-1714, etc.

[0655] In some embodiments, a type of nucleoside in a region or an oligonucleotide is modified, optionally with a different modification compared to another type of nucleoside. In some embodiments, a type of nucleoside in a region or an oligonucleotide is modified with a different modification compared to another type of nucleoside. For example, in some embodiments, a pyrimidine nucleoside comprises a 2′-F modification, and a purine nucleoside comprises a 2′-OMe modification. In some other embodiments, a pyrimidine nucleoside comprises a 2′-OMe modification, and a purine nucleoside comprises a 2′-F modification. In some embodiments, G and C has one type of sugar modification, and A and U has another type of sugar modification. In some embodiments, G and C comprises 2′-OMe modification, and A and U comprises 2′-F modification. In some embodiments, G and C comprises 2′-F modification, and A and U comprises 2′-OMe modification.

[0656] In some embodiments, an internucleotidic linkage following an unmodified sugar moiety is a modified internucleotidic linkage. In some embodiments, an internucleotidic linkage after an unmodified sugar moiety is a phosphorothioate linkage. In some embodiments, each internucleotidic linkage after an unmodified sugar moiety is a modified internucleotidic linkage. In some embodiments, each internucleotidic linkage after an unmodified sugar moiety is a phosphorothioate linkage. In some embodiments, an internucleotidic linkage following a modified sugar moiety is a natural phosphate linkage. In some embodiments, each internucleotidic linkage following a modified sugar moiety is a natural phosphate linkage.

[0657] In some embodiments, a provided pattern of backbone chiral centers comprises repeating (Sp)m(Rp)n, (Rp)n(Sp)m, (Np)t(Rp)n(Sp)m, or (Sp)t(Rp)n(Sp)m units. In some embodiments, a repeating unit is (Sp)m(Rp)n. In some embodiments, a repeating unit is SpRp. In some embodiments, a repeating unit is SpSpRp. In some embodiments, a repeating unit is SpRpRp. In some embodiments, a repeating unit is RpRpSp. In some embodiments, a repeating unit is (Rp)n(Sp)m. In some embodiments, a repeating unit is (Np)t(Rp)n(Sp)m. In some embodiments, a repeating unit is (Sp)t(Rp)n(Sp)m.

[0658] In some embodiments, a provided pattern of backbone chiral centers comprises a (Sp)m(Rp)n, (Rp)n(Sp)m, (Np)t(Rp)n(Sp)m, or (Sp)t(Rp)n(Sp)m unit. In some embodiments, a unit is (Sp)m(Rp)n. In some embodiments, a unit is SpRp. In some embodiments, a unit is SpSpRp. In some embodiments, a unit is SpRpRp. In some embodiments, a unit is RpRpSp. In some embodiments, a unit is (Rp)n(Sp)m. In some embodiments, a unit is (Sp)m(Rp)n. In some embodiments, a unit is (Rp)n(Sp)m. In some embodiments, a unit is (Np)t(Rp)n(Sp)m. In some embodiments, a unit is (Sp)t(Rp)n(Sp)m.

[0659] In some embodiments, a provided pattern of backbone chiral centers comprises (Rp/Sp)-(All Rp or All Sp)-(Rp/Sp). In some embodiments, a provided pattern of backbone chiral centers comprises (Rp)-(All Sp)-(Rp). In some embodiments, a provided pattern of backbone chiral centers comprises (Sp)-(All Rp)-(Sp). In some embodiments, a provided pattern of backbone chiral centers comprises (Rp/Sp)-(repeating (Sp)m(Rp)n)-(Rp/Sp). In some embodiments, a provided pattern of backbone chiral centers comprises (Rp/Sp)-(repeating SpSpRp)-(Rp/Sp).

[0660] In some embodiments, a provided pattern of backbone chiral centers is (Rp/Sp)-(All Rp or All Sp)-(Rp/Sp). In some embodiments, a provided pattern of backbone chiral centers is (Sp)-(All Sp)-(Sp). In some embodiments, each chiral internucleotidic linkage is Sp. In some embodiments, a provided pattern of backbone chiral centers is (Rp)-(All Sp)-(Rp). In some embodiments, a provided pattern of backbone chiral centers is (Sp)-(All Rp)-(Sp). In some embodiments, a provided pattern of backbone chiral centers is (Rp/Sp)-(repeating (Sp)m(Rp)n)-(Rp/Sp). In some embodiments, a provided pattern of backbone chiral centers is (Rp/Sp)-(repeating SpSpRp)-(Rp/Sp).

[0661] In some embodiments, the present disclosure provides oligonucleotide compositions having low toxicity. In some embodiments, the present disclosure provides oligonucleotide compositions having improved protein binding profile. In some embodiments, the present disclosure provides oligonucleotide compositions having improved binding to albumin. In some embodiments, provided compositions have low toxicity and improved binding to certain desired proteins. In some embodiments, provided compositions have low toxicity and improved binding to certain desired proteins. In some embodiments, provided oligonucleotide compositions at the same time provides the same level of, or greatly enhanced, stability and/or activities, e.g., better target-cleavage pattern, better target-cleavage efficiency, better target specificity, etc.

[0662] In some embodiments, the present disclosure provides an oligonucleotide composition comprising a lipid and a first plurality of oligonucleotides which:
[0663] 1) have a common base sequence complementary to a target sequence in a transcript; and
[0664] 2) comprise one or more modified sugar moieties and modified internucleotidic linkages; wherein the lipid is optionally conjugated to one or more oligonucleotides of the plurality.

[0665] In some embodiments, a provided oligonucleotide composition is characterized in that, when it is contacted with the transcript in a transcript splicing system, splicing of the transcript is altered relative to that observed under reference conditions selected from the group consisting of absence of a lipid of the composition, absence of the composition, presence of a reference composition, and combinations thereof.

[0666] In some embodiments, a reference condition is absence of lipids in the composition. In some embodiments, a reference condition is absence of the composition. In some embodiments, a reference condition is presence of a reference composition. Example reference compositions comprising a reference plurality of oligonucleotides are extensively described in this disclosure. In some embodiments, oligonucleotides of the reference plurality have a different structural elements (chemical modifications, stereochemistry, etc.) compared with oligonucleotides of the first plurality in a provided composition. In some embodiments, a reference composition is a stereorandom preparation of oligonucleotides having the same chemical modifications. In some embodiments, a reference composition is a mixture of stereoisomers while a provided composition is a chirally controlled oligonucleotide composition of one stereoisomer. In some embodiments, oligonucleotides of the reference plurality have the same base sequence as oligonucleotide of the first plurality in a provided composition. In some embodiments, oligonucleotides of the reference plurality have the same chemical modifications as oligonucleotide of the first plurality in a provided composition. In some embodiments, oligonucleotides of the reference plurality have the same sugar modifications as oligonucleotide of the first plurality in a provided composition. In some embodiments, oligonucleotides of the reference plurality have the same base modifications as oligonucleotide of the first plurality in a provided composition. In some embodiments, oligonucleotides of the reference plurality have the same internucleotidic linkage modifications as oligonucleotide of the first plurality in a provided composition. In some embodiments, oligonucleotides of the reference plurality have the same stereochemistry as oligonucleotide of the first plurality in a provided composition but different chemical modifications, e.g., base modification, sugar modification, internucleotidic linkage modifications, etc. In some embodiments, oligonucleotides of the reference plurality differ only in that they are not conjugated to lipids.

[0667] In some embodiments, provided oligonucleotide compositions have lower toxicity. In some embodiments, provided oligonucleotide oligonucleotides have improved safety profile. In some embodiments, provided oligonucleotide compositions provided better protein binding properties.

[0668] Example splicing systems are widely known in the art. In some embodiments, a splicing system is an in vivo or in vitro system including components sufficient to achieve splicing of a relevant target transcript. In some embodiments, a splicing system is or comprises a spliceosome (e.g., protein and/or RNA components thereof). In some embodiments, a splicing system is or comprises an organellar membrane (e.g., a nuclear membrane) and/or an organelle (e.g., a nucleus). In some embodiments, a splicing system is or comprises a cell or population thereof. In some embodiments, a splicing system is or comprises a tissue. In some embodiments, a splicing system is or comprises an organism, e.g., an animal, e.g., a mammal such as a mouse, rat, monkey, human, etc.

[0669] In some embodiments, conjugation of oligonucleotides with lipids may improve oligonucleotide properties, e.g., activities, toxicities, etc. In some embodiments, as demonstrated by the present disclosure, conjugation may improve activities of oligonucleotides. In some embodiments, as demonstrated by the present disclosure, conjugation may improve stability of oligonucleotides. In some embodiments, as demonstrated by the present disclosure, conjugation may improve delivery of oligonucleotides to target locations. In some embodiments, as demonstrated by the present disclosure, conjugation may improve delivery of oligonucleotides into cells. In some embodiments, as demonstrated by the present disclosure, conjugation may improve delivery of oligonucleotides into cells in a subject. In some embodiments, as demonstrated by the present disclosure, conjugation may improve activity, safety, stability, and/or delivery of oligonucleotides.

[0670] In some embodiments, the present disclosure provides an oligonucleotide composition comprising one or more lipids, and a first plurality of oligonucleotides which:
[0671] 1) have a common base sequence complementary to a target sequence in a transcript; and
[0672] 2) comprise one or more modified sugar moieties and modified internucleotidic linkages, the oligonucleotide composition being characterized in that, when it is contacted with the transcript in a transcript splicing system, splicing of the transcript is altered relative to that observed under reference conditions selected from the group consisting of absence of the composition, presence of a reference composition, and combinations thereof, wherein the lipids are optionally and independently conjugated to one or more oligonucleotides of the plurality.

[0673] In some embodiments, the present disclosure provides an oligonucleotide composition comprising one or more lipids, and a first plurality of oligonucleotides of a particular oligonucleotide type defined by:
[0674] 1) base sequence;
[0675] 2) pattern of backbone linkages;
[0676] 3) pattern of backbone chiral centers; and
[0677] 4) pattern of backbone phosphorus modifications;

[0678] wherein the lipids are optionally and independently conjugated to one or more oligonucleotides of the plurality, and level of oligonucleotides of the plurality is predetermined.

[0679] In some embodiments, the present disclosure provides an oligonucleotide composition comprising one or more lipids and a first plurality of oligonucleotides of a particular oligonucleotide type defined by:
[0680] 1) base sequence;
[0681] 2) pattern of backbone linkages;
[0682] 3) pattern of backbone chiral centers; and
[0683] 4) pattern of backbone phosphorus modifications,
   which composition is chirally controlled in that it is enriched, relative to a substantially racemic preparation of oligonucleotides having the same base sequence, for oligonucleotides of the particular oligonucleotide type,

[0684] the oligonucleotide composition being characterized in that, when it is contacted with the transcript in a transcript splicing system, splicing of the transcript is altered relative to that observed under reference conditions selected from the group consisting of absence of the composition, presence of a reference composition, and combinations thereof, and

[0685] wherein the lipids are optionally and independently conjugated to one or more oligonucleotides of the plurality, and level of oligonucleotides of the plurality is predetermined.

[0686] In some embodiments, the present disclosure provides an oligonucleotide composition comprising one or more lipids, and a first plurality of oligonucleotides comprising one or more wing regions and a core region, wherein:

[0687] oligonucleotides of the first plurality have the same base sequence; and

[0688] each wing region independently comprises one or more modified internucleotidic linkages and optionally one or more natural phosphate linkages, and the core region independently comprises one or more modified internucleotidic linkages; or

[0689] each wing region independently comprises one or more modified sugar moieties, and the core region comprises one or more un-modified sugar moieties; and

[0690] wherein the lipids are optionally and independently conjugated to one or more oligonucleotides of the plurality.

[0691] In some embodiments, the present disclosure provides an oligonucleotide composition comprising one or more lipids, and a first plurality of oligonucleotides comprising one or more wing regions and a core region, wherein:

[0692] oligonucleotides of the first plurality have the same base sequence;

[0693] each wing region independently has a length of two or more bases, and independently comprises one or more modified internucleotidic linkages and optionally one or more natural phosphate linkages; and

[0694] the core region independently has a length of two or more bases and independently comprises one or more modified internucleotidic linkages; and

[0695] wherein the lipids are optionally and independently conjugated to one or more oligonucleotides of the plurality.

[0696] In some embodiments, the present disclosure provides an oligonucleotide composition comprising one or more lipids and a first plurality of oligonucleotides comprising one or more wing regions and a core region, wherein:

[0697] oligonucleotides of the first plurality have the same base sequence;

[0698] each wing region independently has a length of two or more bases, and independently comprises one or more modified internucleotidic linkages and one or more natural phosphate linkages; and

[0699] the core region independently has a length of two or more bases and independently comprises one or more modified internucleotidic linkages; and

[0700] wherein the lipids are optionally and independently conjugated to one or more oligonucleotides of the plurality.

[0701] In some embodiments, the present disclosure provides an oligonucleotide composition comprising one ore more lipids, and a first plurality of oligonucleotides comprising two wing regions and a core region, wherein:

[0702] oligonucleotides of the first plurality have the same base sequence;

[0703] each wing region independently has a length of two or more bases, and independently comprises one or more modified internucleotidic linkages and one or more natural phosphate linkages; and

[0704] the core region independently has a length of two or more bases and independently comprises one or more modified internucleotidic linkages; and

[0705] wherein the lipids are optionally and independently conjugated to one or more oligonucleotides of the plurality.

[0706] In some embodiments, the present disclosure provides an oligonucleotide composition comprising one or more lipids, and a first plurality of oligonucleotides comprising two wing regions and a core region, wherein:

[0707] oligonucleotides of the first plurality have the same base sequence;

[0708] each wing region independently has a length of two or more bases, and independently comprises one or more modified internucleotidic linkages and one or more natural phosphate linkages;

[0709] the wing region to the 5′-end of the core region comprises at least one modified internucleotidic linkage followed by a natural phosphate linkage in the wing; and

[0710] the wing region to the 3′-end of the core region comprises at least one modified internucleotidic linkage preceded by a natural phosphate linkage in the wing;

[0711] the core region independently has a length of two or more bases and independently comprises one or more modified internucleotidic linkages; and

[0712] wherein the lipids are optionally and independently conjugated to one or more oligonucleotides of the plurality.

[0713] In some embodiments, the present disclosure provides an oligonucleotide composition comprising one or more lipids, and a first plurality of oligonucleotides comprising a wing region and a core region, wherein:

[0714] oligonucleotides of the first plurality have the same base sequence;

[0715] the wing region has a length of two or more bases, and comprises one or more modified internucleotidic linkages and one or more natural phosphate linkages;

[0716] the wing region is to the 5′-end of the core region and comprises a natural phosphate linkage between the two nucleosides at its 3′-end, or the wing region to the 3′-end of the core region and comprises a natural phosphate linkage between the two nucleosides at its 5′-end; and

[0717] the core region independently has a length of two or more bases and independently comprises one or more modified internucleotidic linkages; and

[0718] wherein the lipids are optionally and independently conjugated to one or more oligonucleotides of the plurality.

[0719] In some embodiments, the present disclosure provides an oligonucleotide composition comprising one or more lipids, and a first plurality of oligonucleotides comprising two wing regions and a core region, wherein:

[0720] oligonucleotides of the first plurality have the same base sequence;

[0721] each wing region independently has a length of two or more bases, and independently comprises one or more modified internucleotidic linkages and one or more natural phosphate linkages;

[0722] the wing region to the 5′-end of the core region comprises a natural phosphate linkage between the two nucleosides at its 3′-end;

[0723] the wing region to the 3′-end of a core region comprises a natural phosphate linkage between the two nucleosides at its 5′-end; and

[0724] the core region independently has a length of two or more bases and independently comprises one or more modified internucleotidic linkages; and

[0725] wherein the lipids are optionally and independently conjugated to one or more oligonucleotides of the plurality.

[0726] In some embodiments, the present disclosure provides an oligonucleotide composition comprising one or more lipids, and a first plurality of oligonucleotides comprising one or more wing regions and a core region, wherein:

[0727] oligonucleotides of the first plurality have the same base sequence; and

[0728] each wing region independently comprises one or more modified internucleotidic linkages and optionally one or more natural phosphate linkages, and the core region independently comprises one or more modified internucleotidic linkages; and

[0729] each wing region independently comprises one or more modified sugar moieties, and the core region comprises one or more un-modified sugar moieties; and

[0730] wherein the lipids are optionally and independently conjugated to one or more oligonucleotides of the plurality.

[0731] In some embodiments, the present disclosure provides an oligonucleotide composition comprising one or more lipids, and a first plurality of oligonucleotides comprising one or more wing regions and a core region, wherein:

[0732] oligonucleotides of the first plurality have the same base sequence; and

[0733] each wing region independently comprises one or more modified internucleotidic linkages and one or more natural phosphate linkages, and the core region independently comprises one or more modified internucleotidic linkages; and

[0734] each wing region independently comprises one or more modified sugar moieties, and the core region comprises one or more un-modified sugar moieties; and

[0735] wherein the lipids are optionally and independently conjugated to one or more oligonucleotides of the plurality.

[0736] In some embodiments, the present disclosure provides an oligonucleotide composition comprising one or more lipids, and a first plurality of oligonucleotides which:
[0737] 1) have a common base sequence; and
[0738] 2) comprise one or more wing regions and a core region;
   wherein:

[0739] each wing region comprises at least one modified sugar moiety; and

[0740] each core region comprises at least one un-modified sugar moiety; and

[0741] wherein the lipids are optionally and independently conjugated to one or more oligonucleotides of the plurality.

[0742] In some embodiments, the present disclosure provides a chirally controlled oligonucleotide composition comprising one or more lipids, and oligonucleotides defined by having:
[0743] 1) a common base sequence and length;
[0744] 2) a common pattern of backbone linkages; and
[0745] 3) a common pattern of backbone chiral centers, which composition is a substantially pure preparation of a single oligonucleotide in that a predetermined level of the oligonucleotides in the composition have the common base sequence and length, the common pattern of backbone linkages, and the common pattern of backbone chiral centers; and

[0746] wherein the lipids are optionally conjugated to one or more of the defined oligonucleotides.

[0747] In some embodiments, the present disclosure provides a chirally controlled oligonucleotide composition comprising one or more lipids, and oligonucleotides of a particular oligonucleotide type characterized by:
[0748] 1) a common base sequence and length;
[0749] 2) a common pattern of backbone linkages; and
[0750] 3) a common pattern of backbone chiral centers;
   which composition is chirally controlled in that it is enriched, relative to a substantially racemic preparation of oligonucleotides having the same base sequence and length, for oligonucleotides of the particular oligonucleotide type; and

[0751] wherein the lipids are optionally conjugated to one or more oligonucleotides of the oligonucleotide type.

[0752] In some embodiments, the present disclosure provides a chirally controlled oligonucleotide composition comprising one or more lipids, and oligonucleotides of a particular oligonucleotide type characterized by:
[0753] 1) a common base sequence and length;
[0754] 2) a common pattern of backbone linkages; and
[0755] 3) a common pattern of backbone chiral centers, which composition is a substantially pure preparation of a single oligonucleotide in that at least about 10% of the oligonucleotides in the composition have the common base sequence and length, the common pattern of backbone linkages, and the common pattern of backbone chiral centers; and

[0756] wherein the lipids are optionally and independently conjugated to one or more oligonucleotides of the oligonucleotide type.

[0757] In some embodiments, the present disclosure provides an oligonucleotide composition comprising one or more lipids, and a predetermined level of oligonucleotides which comprise one or more wing regions and a common core region, wherein:
[0758] each wing region independently has a length of two or more bases, and independently and optionally comprises one or more chiral internucleotidic linkages;
[0759] the core region independently has a length of two or more bases, and independently comprises one or more chiral internucleotidic linkages, and the common core region has:
[0760] 1) a common base sequence and length;
[0761] 2) a common pattern of backbone linkages; and
[0762] 3) a common pattern of backbone chiral centers; and

[0763] wherein the lipids are optionally and independently conjugated to one or more of the oligonucleotides.

[0764] In some embodiments, a common base sequence hybridizes with a transcript of dystrophin, myostatin, Huntingtin, a myostatin receptor, ActRIIB, ActRIIA, DMPK, Malat1, SMN2, dystrophia myotonica protein kinase (DMPK), Proprotein convertase subtilisin/kexin type 9 (PCSK9), SMAD7 or KRT14 (Keratin 14).

[0765] In some embodiments, levels of defined oligonucleotides in provided compositions (e.g., oligonucleotides of a plurality; oligonucleotides of an oligonucleotide type, oligonucleotides defined by sequence, backbone linkages, and/or backbone chiral centers, etc.) are predetermined. In some embodiments, levels of defined oligonucleotides are predetermined in that their absolute or relative (e.g., ratio, percentage, etc.) amounts within a composition is controlled.

[0766] A wing and core can be defined by any structural elements. In some embodiments, a wing and core is defined by nucleoside modifications, wherein a wing comprises a nucleoside modification that the core region does not have. In some embodiments, oligonucleotides in provided compositions have a wing-core structure of nucleoside modification. In some embodiments, oligonucleotides in provided compositions have a core-wing structure of nucleoside modification. In some embodiments, oligonucleotides in provided compositions have a wing-core-wing structure of nucleoside modification. In some embodiments, a wing and core is defined by modifications of the sugar moieties. In some embodiments, a wing and core is defined by modifications of the base moieties. In some embodiments, each sugar moiety in the wing region has the same 2′-modification which is not found in the core region. In some embodiments, each sugar moiety in the wing region has the same 2′-modification which is different than any sugar modifications in the core region. In some embodiments, each sugar moiety in the wing region has the same 2′-modification, and the core region has no 2′-modifications. In some embodiments, when two or more wings are present, each sugar moiety in a wing region has the same 2′-modification, yet the common 2′-modification in a first wing region can either be the same as or different from the common 2′-modification in a second wing region. In some embodiments, a wing and core is defined by pattern of backbone internucleotidic linkages. In some embodiments, a wing comprises a type of internucleotidic linkage, and/or a pattern of internucleotidic linkages, that are not found in a core. In some embodiments, a wing region comprises both a modified internucleotidic linkage and a natural phosphate linkage. In some embodiments, the internucleotidic linkage at the 5′-end of a wing to the 5′-end of the core region is a modified internucleotidic linkage. In some embodiments, the internucleotidic linkage at the 3′-end of a wing to the 3′-end of the core region is a modified internucleotidic linkage. In some embodiments, a modified internucleotidic linkage is a chiral internucleotidic linkage.

[0767] In some embodiments, each wing comprises at least one chiral internucleotidic linkage and at least one natural phosphate linkage. In some embodiments, each wing comprises at least one modified sugar moiety. In some embodiments, each wing sugar moiety is modified. In some embodiments, a wing sugar moiety is modified by a modification that is absent from the core region. In some embodiments, a wing region only has modified internucleotidic linkages at one or both of its ends. In some embodiments, a wing region only has a modified internucleotidic linkage at its 5′-end. In some embodiments, a wing region only has a modified internucleotidic linkage at its 3′-end. In some embodiments, a wing region only has modified internucleotidic linkages at its 5′- and 3′-ends. In some embodiments, a wing is to the 5′-end of a core, and the wing only has a modified internucleotidic linkage at its 5′-end. In some embodiments, a wing is to the 5′-end of a core, and the wing only has a modified internucleotidic linkage at its 3′-end. In some embodiments, a wing is to the 5′-end of a core, and the wing only has modified internucleotidic linkages at both its 5′- and 3′-ends. In some embodiments, a wing is to the 3′-end of a core, and the wing only has a modified internucleotidic linkage at its 5′-end. In some embodiments, a wing is to the 3′-end of a core, and the wing only has a modified internucleotidic linkage at its 3′-end. In some embodiments, a wing is to the 3′-end of a core, and the wing only has modified internucleotidic linkages at both its 5′- and 3′-ends.

[0768] In some embodiments, each internucleotidic linkage within a core region is modified. In some embodiments, each internucleotidic linkage within a core region is chiral. In some embodiments, a core region comprises a pattern of backbone chiral centers of (Sp)m(Rp)n, (Rp)n(Sp)m, (Np)t(Rp)n(Sp)m, or (Sp)t(Rp)n(Sp)m. In some embodiments, the pattern of backbone chiral centers of a core region is (Sp)m(Rp)n, (Rp)n(Sp)m, (Np)t(Rp)n(Sp)m, or (Sp)t(Rp)n(Sp)m. In some embodiments, a core region comprises a pattern of backbone chiral centers of (Rp)n(Sp)m, (Np)t(Rp)n(Sp)m, or (Sp)t(Rp)n(Sp)m, wherein m>2. In some embodiments, the pattern of backbone chiral centers of a core region is (Sp)m(Rp)n, (Rp)n(Sp)m, (Np)t(Rp)n(Sp)m, or (Sp)t(Rp)n(Sp)m, wherein m>2. Among other things, in some embodiments such patterns can provide or enhance controlled cleavage of a target sequence, e.g., an RNA sequence.

[0769] In some embodiments, oligonucleotides in provided compositions have a common pattern of backbone phosphorus modifications. In some embodiments, a provided composition is an oligonucleotide composition that is chirally controlled in that the composition contains a predetermined level of oligonucleotides of an individual oligonucleotide type, wherein an oligonucleotide type is defined by:
[0770] 1) base sequence;
[0771] 2) pattern of backbone linkages;
[0772] 3) pattern of backbone chiral centers; and
[0773] 4) pattern of backbone phosphorus modifications.

[0774] As noted above and understood in the art, in some embodiments, base sequence of an oligonucleotide may refer to the identity and/or modification status of nucleoside residues (e.g., of sugar and/or base components, relative to standard naturally occurring nucleotides such as adenine, cytosine, guanosine, thymine, and uracil) in the oligonucleotide and/or to the hybridization character (i.e., the ability to hybridize with particular complementary residues) of such residues.

[0775] In some embodiments, a particular oligonucleotide type may be defined by
[0776] 1A) base identity;
[0777] 1B) pattern of base modification;
[0778] 1C) pattern of sugar modification;
[0779] 2) pattern of backbone linkages;
[0780] 3) pattern of backbone chiral centers; and
[0781] 4) pattern of backbone phosphorus modifications.

[0782] Thus, in some embodiments, oligonucleotides of a particular type may share identical bases but differ in their pattern of base modifications and/or sugar modifications. In some embodiments, oligonucleotides of a particular type may share identical bases and pattern of base modifications (including, e.g., absence of base modification), but differ in pattern of sugar modifications. In some embodiments, oligonucleotides of a particular type are chemically identical in that they have the same base sequence (including length), the same pattern of chemical modifications to sugar and base moieties, the same pattern of backbone linkages (e.g., pattern of natural phosphate linkages, phosphorothioate linkages, phosphorothioate triester linkages, and combinations thereof), the same pattern of backbone chiral centers (e.g., pattern of stereochemistry (Rp/Sp) of chiral internucleotidic linkages), and the same pattern of backbone phosphorus modifications (e.g., pattern of modifications on the internucleotidic phosphorus atom, such as —S—, and -L-R¹ of formula I).

[0783] In some embodiments, the present disclosure provides chirally controlled oligonucleotide compositions of oligonucleotides comprising multiple (e.g., more than 5, 6, 7, 8, 9, or 10) internucleotidic linkages, and particularly for oligonucleotides comprising multiple (e.g., more than 5, 6, 7, 8, 9, or 10) chiral internucleotidic linkages. In some embodiments, in a stereorandom or racemic preparation of oligonucleotides, at least one chiral internucleotidic linkage is formed with less than 90:10, 95:5, 96:4, 97:3, or 98:2 diastereoselectivity. In some embodiments, for a stereoselective or chirally controlled preparation of oligonucleotides, each chiral internucleotidic linkage is formed with greater than 90:10, 95:5, 96:4, 97:3, or 98:2 diastereoselectivity. In some embodiments, for a stereoselective or chirally controlled preparation of oligonucleotides, each chiral internucleotidic linkage is formed with greater than 95:5 diastereoselectivity. In some embodiments, for a stereoselective or chirally controlled preparation of oligonucleotides, each chiral internucleotidic linkage is formed with greater than 96:4 diastereoselectivity. In some embodiments, for a stereoselective or chirally controlled preparation of oligonucleotides, each chiral internucleotidic linkage is formed with greater than 97:3 diastereoselectivity. In some embodiments, for a stereoselective or chirally controlled preparation of oligonucleotides, each chiral internucleotidic linkage is formed with greater than 98:2 diastereoselectivity. In some embodiments, for a stereoselective or chirally controlled preparation of oligonucleotides, each chiral internucleotidic linkage is formed with greater than 99:1 diastereoselectivity. In some embodiments, diastereoselectivity of a chiral internucleotidic linkage in an oligonucleotide may be measured through a model reaction, e.g. formation of a dimer under essentially the same or comparable conditions wherein the dimer has the same internucleotidic linkage as the chiral internucleotidic linkage, the 5′-nucleoside of the dimer is the same as the nucleoside to the 5′-end of the chiral internucleotidic linkage, and the 3′-nucleoside of the dimer is the same as the nucleoside to the 3′-end of the chiral internucleotidic linkage.

[0784] As described herein, provided compositions and methods are capable of altering splicing of transcripts. In some embodiments, provided compositions and methods provide improved splicing patterns of transcripts compared to reference conditions selected from the group consisting of absence of the composition, presence of a reference composition, and combinations thereof. An improvement can be an improvement of any desired biological functions. In some embodiments, for example, in DMD, an improvement is production of an mRNA from which a dystrophin protein with improved biological activities is produced. In some other embodiments, for example, an improvement is down-regulation of STAT3, HNRNPH1 and/or KDR to mitigate tumor progression, malignancy, and angiogenesis through forced splicing-induced nonsense-mediated decay (DSD-NMD).

[0785] In some embodiments, the present disclosure provides methods for modulating levels of target nucleic acids in a system comprising administering a provided composition. In some embodiments, a system is an in vitro system. In some embodiments, a system is a cell. In some embodiments, a system is a tissue. In some embodiments, a system is an organ. In some embodiments, a system is a subject. In some embodiments, a target nucleic acid is genomic DNA. In some embodiments, a target nucleic acid is a transcript. In some embodiments, a target nucleic acid is a primary transcript. In some embodiments, a target nucleic acid is a processed transcript. In some embodiments, a target nucleic acid is a spliced transcript. In some embodiments, a target nucleic acid is RNA. In some embodiments, a target nucleic acid is mRNA. In some embodiments, a target nucleic acid is pre-mRNA. In some embodiments, technologies of the present disclosure which comprise one or more lipids provide better delivery to target locations, better safety, better activity, better stability, and/or better overall results. etc. compared to absence of the lipids.

[0786] In some embodiments, the present disclosure provides a method for altering splicing of a target transcript, comprising administering a provided composition comprising one or more lipids, wherein the splicing of the target transcript is altered relative to reference conditions selected from the group consisting of absence of the lipids, absence of the composition, presence of a reference composition, and combinations thereof.

[0787] In some embodiments, the present disclosure provides a method of generating a set of spliced products from a target transcript, the method comprising steps of:

[0788] contacting a splicing system containing the target transcript with a provided oligonucleotide composition comprising one or more lipids and a first plurality of oligonucleotides, in an amount, for a time, and under conditions sufficient for a set of spliced products to be generated that is different from a set generated under reference conditions selected from the group consisting of absence of the lipids, absence of the composition, presence of a reference composition, and combinations thereof.

[0789] As widely known in the art, many diseases and/or conditions are associated with transcript splicing. For examples, see Garcia-Blanco, et al., Alternative splicing in disease and therapy, Nat. Biotechnol. 2004 May; 22(5):535-46; Wang, et al., Splicing in disease: disruption of the splicing code and the decoding machinery, Nat. Rev. Genet. 2007 October; 8(10):749-61; Havens, et al., Targeting RNA splicing for disease therapy, Wiley Interdiscip. Rev. RNA. 2013 May-June; 4(3):247-66. In some embodiments, the present disclosure provides compositions and methods for treating or preventing diseases.

[0790] In some embodiments, the present disclosure provides a method for treating or preventing a disease, comprising administering to a subject an oligonucleotide composition described herein.

[0791] In some embodiments, the present disclosure provides a method for treating or preventing a disease, comprising administering to a subject a provided oligonucleotide composition.

[0792] In some embodiments, the present disclosure provides a method for treating or preventing a disease, comprising administering a provided oligonucleotide composition,

[0793] the oligonucleotide composition being characterized in that, when it is contacted with the transcript in a transcript splicing system, splicing of the transcript is altered relative to that observed under reference conditions selected from the group consisting of absence of the composition, presence of a reference composition, and combinations thereof.

[0794] In some embodiments, a disease is one in which, after administering a provided composition, one or more spliced transcripts repair, restore or introduce a new beneficial function. For example, in DMD, after skipping one or more exons, functions of dystrophin can be restored, or partially restored, through a truncated but (partially) active version. In some embodiments, a disease is one in which, after administering a provided composition, one or more spliced transcripts repair, a gene is effectively knockdown by altering splicing of the gene transcript.

[0795] In some embodiments, a disease is Duchenne muscular dystrophy. In some embodiments, a disease is spinal muscular atrophy (SMA). In some embodiments, a disease is cancer.

[0796] In general, properties of oligonucleotide compositions as described herein can be assessed using any appropriate assay. Relative toxicity and/or protein binding properties and/or activity and/or delivery for different compositions (e.g., stereocontrolled vs non-stereocontrolled, and/or different stereocontrolled compositions) are typically desirably determined in the same assay, in some embodiments substantially simultaneously and in some embodiments with reference to historical results.

[0797] Those of skill in the art will be aware of and/or will readily be able to develop appropriate assays for particular oligonucleotide compositions. The present disclosure provides descriptions of certain particular assays, for example that may be useful in assessing one or more features of oligonucleotide composition behavior e.g., complement activation, injection site inflammation, protein biding, etc.

[0798] For example, certain assays that may be useful in the assessment of toxicity and/or protein binding properties and/or activity and/or delivery of oligonucleotide compositions may include any assay described and/or exemplified herein.

[0799] In some embodiments, the present disclosure demonstrates that oligonucleotide compositions comprising oligonucleotides with conjugation to one or more lipids and controlled structural elements, e.g., controlled chemical modification and/or controlled backbone stereochemistry patterns, provide unexpected properties, including but not limited to those described herein. In some embodiments, provided compositions have improved properties, such as improved splicing-altering capabilities, lower toxicity, or improved protein binding profile, and/or improved delivery, etc. Particularly, in some embodiments, the present disclosure provides compositions and methods for improved delivery to target locations. Further, in some embodiments, the present disclosure provides compositions and methods for altering splicing of transcripts. In some embodiments, the present disclosure provides compositions and methods for improving splicing of transcripts. In some embodiments, altered transcript splicing by provided compositions and methods include production of products having desired and/or improved biological functions, and/or knockdown of undesired product by, e.g., modifying splicing products so that undesired biological functions can be suppressed or removed.

[0800] In some embodiments, a transcript is pre-mRNA. In some embodiments, a splicing product is mature RNA. In some embodiments, a splicing product is mRNA. In some embodiments, alteration comprises skipping one or more exons. In some embodiments, splicing of a transcript is improved in that exon skipping increases levels of mRNA and proteins that have improved beneficial activities compared with absence of exon skipping. In some embodiments, an exon causing frameshift is skipped. In some embodiments, an exon comprising an undesired mutation is skipped. In some embodiments, an exon comprising a premature termination codon is skipped. An undesired mutation can be a mutation causing changes in protein sequences; it can also be a silent mutation. In some embodiments, an exon comprising an undesired SNP is skipped.

[0801] In some embodiments, splicing of a transcript is improved in that exon skipping lowers levels of mRNA and proteins that have undesired activities compared with absence of exon skipping. In some embodiments, a target is knocked down through exon skipping which, by skipping one or more exons, causes premature stop codon and/or frameshift mutations.

[0802] Reading frame correction is achieved by skipping one or two exons flanking a deletion, by skipping in-frame exons containing a nonsense mutation, or by skipping duplicated exons.

[0803] In some embodiments, the present disclosure provides compositions and methods for reducing certain undesired repeats, such as CAG repeat (see, e.g., Evers, et al., Targeting several CAG expansion diseases by a single antisense oligonucleotide, PLoS One. 2011; 6(9):e24308. doi: 10.1371/journal.pone.0024308; Mulders, et al., Triplet-repeat oligonucleotide-mediated reversal of RNA toxicity in myotonic dystrophy, Proc Natl Acad Sci U.S.A. 2009 Aug. 18; 106(33):13915-20; etc.) by altering splicing, e.g., exon skipping. In some embodiments, example targets include but are not limited to: HTT (Huntingtin), ATXN3 (Ataxin 3), DMPK (dystrophia myotonica protein kinase), CNBP (Cellular Nucleic Acid Binding Protein), AR (Androgen Receptor), FOX01 (forkhead box protein 01), PCSK9 (proprotein convertase subtilisin/kexin type 9), TTR (transthyretin), AAT (alpha-1 antitrypsin), TMPRSS6 (transmembrane protease, serine 6), ALAS1 (aminolevulinate synthase 1), ATIII (antithrombin 3), FVII (factor VII), HAMP (hepcidin antimicrobial peptide), FXI (factor XI), FXII (factor XII), and PD-L1 (programmed death-ligand 1), APOC3 (Apolipoprotein C-III), PNPLA3 (patatin like phospholipase domain containing 3), and C9orf72. In some embodiments, targets include but are not limited to HTT, ATXN3, DMPK, CNBP, AR, C9ORF72 (target for familial frontotemporal dementia and amyotrophic lateral sclerosis) and those listed below:

| | | | | | | | |
|---|---|---|---|---|---|---|---|
| | | | | | Repeat | | |
| | | | Parent of | Repeat | number | Repeat | |
| | | | origin of | number | (pre- | number | Somatic |
| Disease | Sequence | Location | expansion | (normal) | mutation) | (disease) | instability |

Diseases with coding TNRs

| | | | | | | | |
|---|---|---|---|---|---|---|---|
| DRPLA | CAG | ATN1 (exon 5) | P | 6-35 | 35-48 | 49-88 | Yes |
| HD | CAG | HTT (exon 1) | P | 6-29 | 29-37 | 38-180 | Yes |
| OPMD | GCN | PABPN1 | P and M | 10 | 12-17 | >11 | None found in |
| | | (exon 1) | | | | | tissue tested |
| | | | | | | | (hypothalamus) |
| SCA1 | CAG | ATXN1 | P | 6-39 | 40 | 41-83 | Yes |
| | | (exon 8) | | | | | |
| SCA2 | CAG | ATXN2 | P | <31 | 31-32 | 32-200 | Unknown |
| | | (exon 1) | | | | | |
| SCA3 | CAG | ATXN3 | P | 12-40 | 41-85 | 52-86 | Unknown |
| (Machado- | | (exon 8) | | | | | |
| Joseph | | | | | | | |
| disease) | | | | | | | |
| SCA6 | CAG | CACNA1A | P | <18 | 19 | 20-33 | None found |
| | | (exon 47) | | | | | |
| SCA7 | CAG | ATXN7 | P | 4-17 | 28-33 | >36 | Yes |
| | | (exon 3) | | | | to >460 | |
| SCA17 | CAG | TBP (exon 3) | P > M | 25-42 | 43-48 | 45-66 | Yes |
| SMBA | CAG | AR (exon 1) | P | 13-31 | 32-39 | 40 | None found |

Diseases with non-coding TNRs

| | | | | | | | |
|---|---|---|---|---|---|---|---|
| DM1 | CTG | DMPK (3′ UTR) | M | 5-37 | 37-50 | <50 | Yes |
| DM2 | CCTG | CNBP | Uncertain | <30 | 31-74 | 75-11,000 | Yes |
| | | (intron 1) | | | | | |
| FRAX-E | GCC | AFF2 (5′ UTR) | M | 4-39 | 40-200 | >200 | Unknown |
| FRDA | GAA | FXN (intron 1) | Recessive | 5-30 | 31-100 | 70-1,000 | Yes |
| FXS | CGG | FMR1 (5′ UTR) | M | 6-50 | 55-200 | 200-4,000 | Yes |
| HDL2 | CTG | JPH3 (exon 2A) | M | 6-27 | 29-35 | 36-57 | Unknown |
| SCAB | CTG | ATXN8OS | M | 15-34 | 34-89 | 89-250 | Unknown |
| | | (3′ UTR) | | | | | |
| SCA10 | ATTCT | ATXN10 | M and P | 10-29 | 29-400 | 400-4,500 | Yes |
| | | (intron 9) | (smaller | | | | |
| | | | changes | | | | |
| | | | with M) | | | | |
| SCA12 | CAG | PPP2R2B | M and P | 7-28 | 28-66 | 66-78 | None found |
| | | (5′ UTR) | (more | | | | |
| | | | unstable | | | | |
| | | | with P) | | | | |

AFF2, AF4/FMR2 family, member 2; AR, androgen receptor;
ATN1, atrophin 1;
ATXN, ataxin;
ATXN8OS, ATXN8 opposite strand (non-protein coding);
CACNA1A, calcium channel, voltage-dependent, P/Q type, alpha 1A subunit;
CNBP, CCHC-type zinc finger nucleic acid binding protein;
DM, myotonic dystrophy; DMPK, dystrophia myotonica-protein kinase;
DRPLA, dentatorubral-pallidoluysian atrophy;
FMR1, fragile X mental retardation 1;
FRAX-E, mental retardation, X-linked, associated with FRAXE;
FRDA, Friedreich's ataxia; FXN, frataxin;
FXS, fragile X syndrome;
FXTAS, fragile X-associated tremor/ataxia syndrome;
HD, Huntington's disease;
HDL2, Huntington's disease-like 2;
HTT, huntingtin;
JPH3, junctophilin 3;
M, maternal;
OPMD, oculopharyngeal muscular dystrophy;
P, paternal;
PABPN1, poly(A) binding protein nuclear 1;
PPP2R2B, protein phosphatase 2, regulatory subunit B;
SCA, spinocerebellar ataxia;
SMBA, spinomuscular bulbar atrophy;
TBP, TATA-box binding protein;
TNR, trinucleotide repeat.

[0804] In some embodiments, provided oligonucleotides in provided compositions, e.g., oligonucleotides of a first plurality, comprise base modifications, sugar modifications, and/or internucleotidic linkage modifications. In some embodiments, provided oligonucleotides comprise base modifications and sugar modifications. In some embodiments, provided oligonucleotides comprise base modifications and internucleotidic linkage modifications. In some embodiments, provided oligonucleotides comprise sugar modifications and internucleotidic modifications. In some embodiments, provided compositions comprise base modifications, sugar modifications, and internucleotidic linkage modifications. Example chemical modifications, such as base modifications, sugar modifications, internucleotidic linkage modifications, etc. are widely known in the art including but not limited to those described in this disclosure. In some embodiments, a modified base is substituted A, T, C, G or U. In some embodiments, a sugar modification is 2′-modification. In some embodiments, a 2′-modification is 2′-R¹. In some embodiments, a 2′-modification is 2′-F modification. In some embodiments, a 2′-modification is 2′-OR¹. In some embodiments, a 2′-modification is 2′-OR¹, wherein R¹ is optionally substituted alkyl. In some embodiments, a 2′-modification is 2′-OMe. In some embodiments, a 2′-modification is 2′-MOE. In some embodiments, a modified sugar moiety is a bridged bicyclic or polycyclic ring. In some embodiments, a modified sugar moiety is a bridged bicyclic or polycyclic ring having 5-20 ring atoms wherein one or more ring atoms are optionally and independently heteroatoms. Example ring structures are widely known in the art, such as those found in BNA, LNA, etc. In some embodiments, provided oligonucleotides may comprise more than one types of sugar modifications; in some embodiments, provided oligonucleotides comprise both 2′-F and 2′-OR¹ modifications. In some embodiments, provided oligonucleotides comprise both 2′-F and 2′-OMe modifications. In some embodiments, provided oligonucleotides comprise both 2′-F and 2′-OMe modifications, and both phosphorothioate and natural phosphate linkages. In some embodiments, each chiral internucleotidic linkage, e.g., phosphorothioate linkage, is chirally controlled. In some embodiments, provided oligonucleotides comprise both one or more modified internucleotidic linkages and one or more natural phosphate linkages. In some embodiments, oligonucleotides comprising both modified internucleotidic linkage and natural phosphate linkage and compositions thereof provide improved properties, e.g., activities and toxicities, etc. In some embodiments, a modified internucleotidic linkage is a chiral internucleotidic linkage. In some embodiments, a modified internucleotidic linkage is a phosphorothioate linkage. In some embodiments, a modified internucleotidic linkage is a substituted phosphorothioate linkage.

[0805] Among other things, the present disclosure encompasses the recognition that stereorandom oligonucleotide preparations contain a plurality of distinct chemical entities that differ from one another, e.g., in the stereochemical structure of individual backbone chiral centers within the oligonucleotide chain. Without control of stereochemistry of backbone chiral centers, stereorandom oligonucleotide preparations provide uncontrolled compositions comprising undetermined levels of oligonucleotide stereoisomers. Even though these stereoisomers may have the same base sequence, they are different chemical entities at least due to their different backbone stereochemistry, and they can have, as demonstrated herein, different properties, e.g., activities, toxicities, etc. Among other things, the present disclosure provides new compositions that are or contain particular stereoisomers of oligonucleotides of interest. In some embodiments, a particular stereoisomer may be defined, for example, by its base sequence, its length, its pattern of backbone linkages, and its pattern of backbone chiral centers. As is understood in the art, in some embodiments, base sequence may refer to the identity and/or modification status of nucleoside residues (e.g., of sugar and/or base components, relative to standard naturally occurring nucleotides such as adenine, cytosine, guanosine, thymine, and uracil) in an oligonucleotide and/or to the hybridization character (i.e., the ability to hybridize with particular complementary residues) of such residues. In some embodiments, oligonucleotides in provided compositions comprise sugar modifications, e.g., 2′-modifications, at e.g., a wing region. In some embodiments, oligonucleotides in provided compositions comprise a region in the middle, e.g., a core region, that has no sugar modifications. In some embodiments, the present disclosure provide an oligonucleotide composition comprising a predetermined level of oligonucleotides of an individual oligonucleotide type which are chemically identical, e.g., they have the same base sequence, the same pattern of nucleoside modifications (modifications to sugar and base moieties, if any), the same pattern of backbone chiral centers, and the same pattern of backbone phosphorus modifications. The present disclosure demonstrates, among other things, that individual stereoisomers of a particular oligonucleotide can show different stability and/or activity (e.g., functional and/or toxicity properties) from each other. In some embodiments, property improvements achieved through inclusion and/or location of particular chiral structures within an oligonucleotide can be comparable to, or even better than those achieved through use of particular backbone linkages, residue modifications, etc. (e.g., through use of certain types of modified phosphates [e.g., phosphorothioate, substituted phosphorothioate, etc.], sugar modifications [e.g., 2′-modifications, etc.], and/or base modifications [e.g., methylation, etc.]). Among other things, the present disclosure recognizes that, in some embodiments, properties (e.g., activities, toxicities, etc.) of an oligonucleotide can be adjusted by optimizing its pattern of backbone chiral centers, optionally in combination with adjustment/optimization of one or more other features (e.g., linkage pattern, nucleoside modification pattern, etc.) of the oligonucleotide. As exemplified by various examples in the present disclosure, provided chirally controlled oligonucleotide compositions can demonstrate improved properties, such as lower toxicity, improved protein binding profile, improved delivery, etc.

[0806] In some embodiments, oligonucleotide properties can be adjusted by optimizing stereochemistry (pattern of backbone chiral centers) and chemical modifications (modifications of base, sugar, and/or internucleotidic linkage). Among other things, the present disclosure demonstrates that stereochemistry can further improve properties of oligonucleotides comprising chemical modifications. In some embodiments, the present disclosure provides oligonucleotide compositions wherein the oligonucleotides comprise nucleoside modifications, chiral internucleotidic linkages and natural phosphate linkages. For example, WV-1092 (mG*SmGmCmAmC*SA*SA*SG*SG*SG*SC*SA*SC*RA*SG*SmAmCmUmU*SmC (SEQ ID NO: 8)) comprises 2′-OMe modifications, phosphate and phosphorothioate linkages in its 5′- and 3′-wing regions, and phosphorothioate linkages in its core regions.

[0807] In some embodiments, the present disclosure provides oligonucleotide compositions which, unexpectedly, greatly improve properties of oligonucleotides. In some embodiments, provided oligonucleotide compositions provides surprisingly low toxicity. In some embodiments, provided oligonucleotide compositions provides surprisingly improved protein binding profile. In some embodiments, provided oligonucleotide compositions provides surprisingly enhanced delivery. In some embodiments, certain property improvement, such as lower toxicity, improved protein binding profile, and/or enhanced delivery, etc., are achieved without sacrificing other properties, e.g., activities, specificity, etc. In some embodiments, provided compositions provides lower toxicity, improved protein binding profile, and/or enhanced delivery, and improved activity, stability, and/or specificity (e.g., target-specificity, cleavage site specificity, etc.). Example improved activities (e.g., enhanced cleavage rates, increased target-specificity, cleavage site specificity, etc.) include but are not limited to those described in WO/2014/012081 and WO/2015/107425.

[0808] In some embodiments, a pattern of backbone chiral centers provides increased stability. In some embodiments, a pattern of backbone chiral centers provides surprisingly increased activity. In some embodiments, a pattern of backbone chiral centers provides increased stability and activity. In some embodiments, a pattern of backbone chiral centers provides surprisingly low toxicity. In some embodiments, a pattern of backbone chiral centers provides surprisingly low immune response. In some embodiments, a pattern of backbone chiral centers provides surprisingly low complement activation. In some embodiments, a pattern of backbone chiral centers provides surprisingly low complement activation via the alternative pathway. In some embodiments, a pattern of backbone chiral centers provides surprisingly improved protein binding profile. In some embodiments, a pattern of backbone chiral centers provides surprisingly increased binding to certain proteins. In some embodiments, a pattern of backbone chiral centers provides surprisingly enhanced delivery.

[0809] In some embodiments, a pattern of backbone chiral centers comprises or is (Sp)m(Rp)n, (Rp)n(Sp)m, (Np)t(Rp)n(Sp)m, or (Sp)t(Rp)n(Sp)m. In some embodiments, a pattern of backbone chiral centers comprises or is (Rp)n(Sp)m, (Np)t(Rp)n(Sp)m, or (Sp)t(Rp)n(Sp)m, wherein m>2. In some embodiments, a pattern of backbone chiral centers comprises or is (Rp)n(Sp)m, (Np)t(Rp)n(Sp)m, or (Sp)t(Rp)n(Sp)m, wherein n is 1, t>1, and m>2. In some embodiments, m>3. In some embodiments, m>4. In some embodiments, a pattern of backbone chiral centers comprises one or more achiral natural phosphate linkages.

[0810] In some embodiments, the present disclosure recognizes that chemical modifications, such as modifications of nucleosides and internucleotidic linkages, can provide enhanced properties. In some embodiments, the present disclosure demonstrates that combinations of chemical modifications and stereochemistry can provide unexpected, greatly improved properties (e.g., bioactivity, selectivity, etc.). In some embodiments, chemical combinations, such as modifications of sugars, bases, and/or internucleotidic linkages, are combined with stereochemistry patterns, e.g., (Rp)n(Sp)m, (Np)t(Rp)n(Sp)m, or (Sp)t(Rp)n(Sp)m, to provide oligonucleotides and compositions thereof with surprisingly enhanced properties. In some embodiments, a provided oligonucleotide composition is chirally controlled, and comprises a combination of 2′-modification of one or more sugar moieties, one or more natural phosphate linkages, one or more phosphorothioate linkages, and a stereochemistry pattern of (Rp)n(Sp)m, (Np)t(Rp)n(Sp)m, or (Sp)t(Rp)n(Sp)m, wherein m>2. In some embodiments, n is 1, t>1, and m>2. In some embodiments, m>3. In some embodiments, m>4.

[0811] In some embodiments, a pattern of backbone chiral centers comprises or is (Rp)n(Sp)m, (Sp)t(Rp)n, (Np)t(Rp)n(Sp)m, or (Sp)t(Rp)n(Sp)m. In some embodiments, a pattern of backbone chiral centers comprises or is (Rp)n(Sp)m. In some embodiments, a pattern of backbone chiral centers comprises or is (Sp)t(Rp)n. In some embodiments, a pattern of backbone chiral centers comprises or is (Np)t(Rp)n(Sp)m. In some embodiments, a pattern of backbone chiral centers comprises or is (Sp)t(Rp)n(Sp)m. In some embodiments, each of t and m is independently greater than 1, 2, 3, 4, 5, 6, 7, 8, 9, 10, 11, 12, 13, 14, 15, 16, 17, 18, 19 or 20. In some embodiments, each of t and m is independently greater than 1. In some embodiments, each of t and m is independently greater than 2. In some embodiments, each of t and m is independently greater than 2. In some embodiments, each of t and m is independently greater than 3. In some embodiments, each of t and m is independently greater than 4. In some embodiments, each of t and m is independently greater than 5. In some embodiments, each of t and m is independently greater than 6. In some embodiments, each of t and m is independently greater than 7. In some embodiments, each of t and m is independently greater than 8. In some embodiments, each of t and m is independently greater than 9. In some embodiments, each of t and m is independently greater than 10. In some embodiments, each of t and m is independently greater than 11. In some embodiments, each of t and m is independently greater than 12. In some embodiments, each of t and m is independently greater than 13. In some embodiments, each of t and m is independently greater than 14. In some embodiments, each of t and m is independently greater than 15. In some embodiments, t is greater than 1, 2, 3, 4, 5, 6, 7, 8, 9, 10, 11, 12, 13, 14, 15, 16, 17, 18, 19 or 20. In some embodiments, t is greater than 1. In some embodiments, t is greater than 2. In some embodiments, t is greater than 2. In some embodiments, t is greater than 3. In some embodiments, t is greater than 4. In some embodiments, t is greater than 5. In some embodiments, t is greater than 6. In some embodiments, t is greater than 7. In some embodiments, t is greater than 8. In some embodiments, t is greater than 9. In some embodiments, t is greater than 10. In some embodiments, t is greater than 11. In some embodiments, t is greater than 12. In some embodiments, t is greater than 13. In some embodiments, t is greater than 14. In some embodiments, t is greater than 15. In some embodiments, t is 1, 2, 3, 4, 5, 6, 7, 8, 9, 10, 11, 12, 13, 14, 15, 16, 17, 18, 19 or 20. In some embodiments, t is 1. In some embodiments, t is 2. In some embodiments, t is 2. In some embodiments, t is 3. In some embodiments, t is 4. In some embodiments, t is 5. In some embodiments, t is 6. In some embodiments, t is 7. In some embodiments, t is 8. In some embodiments, t is 9. In some embodiments, t is 10. In some embodiments, t is 11. In some embodiments, t is 12. In some embodiments, t is 13. In some embodiments, t is 14. In some embodiments, t is 15. In some embodiments, m is greater than 1, 2, 3, 4, 5, 6, 7, 8, 9, 10, 11, 12, 13, 14, 15, 16, 17, 18, 19 or 20. In some embodiments, m is greater than 1. In some embodiments, m is greater than 2. In some embodiments, m is greater than 2. In some embodiments, m is greater than 3. In some embodiments, m is greater than 4. In some embodiments, m is greater than 5. In some embodiments, m is greater than 6. In some embodiments, m is greater than 7. In some embodiments, m is greater than 8. In some embodiments, m is greater than 9. In some embodiments, m is greater than 10. In some embodiments, m is greater than 11. In some embodiments, m is greater than 12. In some embodiments, m is greater than 13. In some embodiments, m is greater than 14. In some embodiments, m is greater than 15. In some embodiments, m is 1, 2, 3, 4, 5, 6, 7, 8, 9, 10, 11, 12, 13, 14, 15, 16, 17, 18, 19 or 20. In some embodiments, m is 1. In some embodiments, m is 2. In some embodiments, m is 2. In some embodiments, m is 3. In some embodiments, m is 4. In some embodiments, m is 5. In some embodiments, m is 6. In some embodiments, m is 7. In some embodiments, m is 8. In some embodiments, m is 9. In some embodiments, m is 10. In some embodiments, m is 11. In some embodiments, m is 12. In some embodiments, m is 13. In some embodiments, m is 14. In some embodiments, m is 15. In some embodiments, t=m. In some embodiments, n is greater than 1, 2, 3, 4, 5, 6, 7, 8, 9, 10, 11, 12, 13, 14, 15, 16, 17, 18, 19 or 20. In some embodiments, n is greater than 1. In some embodiments, n is greater than 2. In some embodiments, n is greater than 2. In some embodiments, n is greater than 3. In some embodiments, n is greater than 4. In some embodiments, n is greater than 5. In some embodiments, n is greater than 6. In some embodiments, n is greater than 7. In some embodiments, n is greater than 8. In some embodiments, n is greater than 9. In some embodiments, n is greater than 10. In some embodiments, n is greater than 11. In some embodiments, n is greater than 12. In some embodiments, n is greater than 13. In some embodiments, n is greater than 14. In some embodiments, n is greater than 15. In some embodiments, n is 1, 2, 3, 4, 5, 6, 7, 8, 9, 10, 11, 12, 13, 14, 15, 16, 17, 18, 19 or 20. In some embodiments, n is 1. In some embodiments, n is 2. In some embodiments, n is 2. In some embodiments, n is 3. In some embodiments, n is 4. In some embodiments, n is 5. In some embodiments, n is 6. In some embodiments, n is 7. In some embodiments, n is 8. In some embodiments, n is 9. In some embodiments, n is 10. In some embodiments, n is 11. In some embodiments, n is 12. In some embodiments, n is 13. In some embodiments, n is 14. In some embodiments, n is 15.

[0812] In some embodiments, provided oligonucleotides comprise one or more modified sugar moieties. In some embodiments, provided oligonucleotides comprise one or more modified sugar moieties. In some embodiments, provided oligonucleotides comprise 2 or more modified sugar moieties. In some embodiments, provided oligonucleotides comprise 3 or more modified sugar moieties. In some embodiments, provided oligonucleotides comprise 4 or more modified sugar moieties. In some embodiments, provided oligonucleotides comprise 5 or more modified sugar moieties. In some embodiments, provided oligonucleotides comprise 6 or more modified sugar moieties. In some embodiments, provided oligonucleotides comprise 7 or more modified sugar moieties. In some embodiments, provided oligonucleotides comprise 8 or more modified sugar moieties. In some embodiments, provided oligonucleotides comprise 9 or more modified sugar moieties. In some embodiments, provided oligonucleotides comprise 10 or more modified sugar moieties. In some embodiments, provided oligonucleotides comprise 15 or more modified sugar moieties. In some embodiments, provided oligonucleotides comprise 20 or more modified sugar moieties. In some embodiments, provided oligonucleotides comprise 25 or more modified sugar moieties. In some embodiments, provided oligonucleotides comprise 30 or more modified sugar moieties.

[0813] Provided oligonucleotides can comprise various number of chiral internucleotidic linkages. In some embodiments, provided oligonucleotides comprise no chiral internucleotidic linkages. In some embodiments, provided oligonucleotides comprise one chiral internucleotidic linkage. In some embodiments, provided oligonucleotides comprise 2 or more chiral internucleotidic linkages. In some embodiments, provided oligonucleotides comprise 3 or more chiral internucleotidic linkages. In some embodiments, provided oligonucleotides comprise 4 or more chiral internucleotidic linkages. In some embodiments, provided oligonucleotides comprise 5 or more chiral internucleotidic linkages. In some embodiments, provided oligonucleotides comprise 6 or more chiral internucleotidic linkages. In some embodiments, provided oligonucleotides comprise 7 or more chiral internucleotidic linkages. In some embodiments, provided oligonucleotides comprise 8 or more chiral internucleotidic linkages. In some embodiments, provided oligonucleotides comprise 9 or more chiral internucleotidic linkages. In some embodiments, provided oligonucleotides comprise 10 or more chiral internucleotidic linkages. In some embodiments, provided oligonucleotides comprise 15 or more chiral internucleotidic linkages. In some embodiments, provided oligonucleotides comprise 20 or more chiral internucleotidic linkages. In some embodiments, provided oligonucleotides comprise 25 or more chiral internucleotidic linkages. In some embodiments, provided oligonucleotides comprise 30 or more chiral internucleotidic linkages.

[0814] Provided oligonucleotides can comprise various number of achiral internucleotidic linkages. In some embodiments, provided oligonucleotides comprise no achiral internucleotidic linkages. In some embodiments, provided oligonucleotides comprise one achiral internucleotidic linkage. In some embodiments, provided oligonucleotides comprise 2 or more achiral internucleotidic linkages. In some embodiments, provided oligonucleotides comprise 3 or more achiral internucleotidic linkages. In some embodiments, provided oligonucleotides comprise 4 or more achiral internucleotidic linkages. In some embodiments, provided oligonucleotides comprise 5 or more achiral internucleotidic linkages. In some embodiments, provided oligonucleotides comprise 6 or more achiral internucleotidic linkages. In some embodiments, provided oligonucleotides comprise 7 or more achiral internucleotidic linkages. In some embodiments, provided oligonucleotides comprise 8 or more achiral internucleotidic linkages. In some embodiments, provided oligonucleotides comprise 9 or more achiral internucleotidic linkages. In some embodiments, provided oligonucleotides comprise 10 or more achiral internucleotidic linkages. In some embodiments, provided oligonucleotides comprise 15 or more achiral internucleotidic linkages. In some embodiments, provided oligonucleotides comprise 20 or more achiral internucleotidic linkages. In some embodiments, provided oligonucleotides comprise 25 or more achiral internucleotidic linkages. In some embodiments, provided oligonucleotides comprise 30 or more achiral internucleotidic linkages.

[0815] In some embodiments, 5% or more of the sugar moieties of provided oligonucleotides are modified. In some embodiments, 10% or more of the sugar moieties of provided oligonucleotides are modified. In some embodiments, 15% or more of the sugar moieties of provided oligonucleotides are modified. In some embodiments, 20% or more of the sugar moieties of provided oligonucleotides are modified. In some embodiments, 25% or more of the sugar moieties of provided oligonucleotides are modified. In some embodiments, 30% or more of the sugar moieties of provided oligonucleotides are modified. In some embodiments, 35% or more of the sugar moieties of provided oligonucleotides are modified. In some embodiments, 40% or more of the sugar moieties of provided oligonucleotides are modified. In some embodiments, 45% or more of the sugar moieties of provided oligonucleotides are modified. In some embodiments, 50% or more of the sugar moieties of provided oligonucleotides are modified. In some embodiments, 55% or more of the sugar moieties of provided oligonucleotides are modified. In some embodiments, 60% or more of the sugar moieties of provided oligonucleotides are modified. In some embodiments, 65% or more of the sugar moieties of provided oligonucleotides are modified. In some embodiments, 70% or more of the sugar moieties of provided oligonucleotides are modified. In some embodiments, 75% or more of the sugar moieties of provided oligonucleotides are modified. In some embodiments, 80% or more of the sugar moieties of provided oligonucleotides are modified. In some embodiments, 85% or more of the sugar moieties of provided oligonucleotides are modified. In some embodiments, 90% or more of the sugar moieties of provided oligonucleotides are modified. In some embodiments, 95% or more of the sugar moieties of provided oligonucleotides are modified. In some embodiments, each sugar moiety of provided oligonucleotides is modified.

[0816] In some embodiments, provided oligonucleotides comprise one or more 2′-F. In some embodiments, provided oligonucleotides comprise two or more 2′-F. In some embodiments, provided oligonucleotides comprise three or more 2′-F. In some embodiments, provided oligonucleotides comprise four or more 2′-F. In some embodiments, provided oligonucleotides comprise five or more 2′-F. In some embodiments, provided oligonucleotides comprise six or more 2′-F. In some embodiments, provided oligonucleotides comprise seven or more 2′-F. In some embodiments, provided oligonucleotides comprise eight or more 2′-F. In some embodiments, provided oligonucleotides comprise nine or more 2′-F. In some embodiments, provided oligonucleotides comprise ten or more 2′-F. In some embodiments, provided oligonucleotides comprise 11 or more 2′-F. In some embodiments, provided oligonucleotides comprise 12 or more 2′-F. In some embodiments, provided oligonucleotides comprise 13 or more 2′-F. In some embodiments, provided oligonucleotides comprise 14 or more 2′-F. In some embodiments, provided oligonucleotides comprise 15 or more 2′-F. In some embodiments, provided oligonucleotides comprise 16 or more 2′-F. In some embodiments, provided oligonucleotides comprise 17 or more 2′-F. In some embodiments, provided oligonucleotides comprise 18 or more 2′-F. In some embodiments, provided oligonucleotides comprise 19 or more 2′-F. In some embodiments, provided oligonucleotides comprise 20 or more 2′-F. In some embodiments, provided oligonucleotides comprise 21 or more 2′-F. In some embodiments, provided oligonucleotides comprise 22 or more 2′-F. In some embodiments, provided oligonucleotides comprise 23 or more 2′-F. In some embodiments, provided oligonucleotides comprise 24 or more 2′-F. In some embodiments, provided oligonucleotides comprise 25 or more 2′-F. In some embodiments, provided oligonucleotides comprise 30 or more 2′-F. In some embodiments, provided oligonucleotides comprise 35 or more 2′-F.

[0817] In some embodiments, provided oligonucleotides comprise one 2′-F. In some embodiments, provided oligonucleotides comprise two 2′-F. In some embodiments, provided oligonucleotides comprise three 2′-F. In some embodiments, provided oligonucleotides comprise four 2′-F. In some embodiments, provided oligonucleotides comprise five 2′-F. In some embodiments, provided oligonucleotides comprise six 2′-F. In some embodiments, provided oligonucleotides comprise seven 2′-F. In some embodiments, provided oligonucleotides comprise eight 2′-F. In some embodiments, provided oligonucleotides comprise nine 2′-F. In some embodiments, provided oligonucleotides comprise ten 2′-F. In some embodiments, provided oligonucleotides comprise 11 2′-F. In some embodiments, provided oligonucleotides comprise 12 2′-F. In some embodiments, provided oligonucleotides comprise 13 2′-F. In some embodiments, provided oligonucleotides comprise 14 2′-F. In some embodiments, provided oligonucleotides comprise 15 2′-F. In some embodiments, provided oligonucleotides comprise 16 2′-F. In some embodiments, provided oligonucleotides comprise 17 2′-F. In some embodiments, provided oligonucleotides comprise 18 2′-F. In some embodiments, provided oligonucleotides comprise 19 2′-F. In some embodiments, provided oligonucleotides comprise 20 2′-F. In some embodiments, provided oligonucleotides comprise 21 2′-F. In some embodiments, provided oligonucleotides comprise 22 2′-F. In some embodiments, provided oligonucleotides comprise 23 2′-F. In some embodiments, provided oligonucleotides comprise 24 2′-F. In some embodiments, provided oligonucleotides comprise 25 2′-F. In some embodiments, provided oligonucleotides comprise 30 2′-F. In some embodiments, provided oligonucleotides comprise 35 2′-F.

[0818] In some embodiments, provided oligonucleotides comprise one or more consecutive 2′-F. In some embodiments, provided oligonucleotides comprise two or more consecutive 2′-F. In some embodiments, provided oligonucleotides comprise three or more consecutive 2′-F. In some embodiments, provided oligonucleotides comprise four or more consecutive 2′-F. In some embodiments, provided oligonucleotides comprise five or more consecutive 2′-F. In some embodiments, provided oligonucleotides comprise six or more consecutive 2′-F. In some embodiments, provided oligonucleotides comprise seven or more consecutive 2′-F. In some embodiments, provided oligonucleotides comprise eight or more consecutive 2′-F. In some embodiments, provided oligonucleotides comprise nine or more consecutive 2′-F. In some embodiments, provided oligonucleotides comprise ten or more consecutive 2′-F. In some embodiments, provided oligonucleotides comprise 11 or more consecutive 2′-F. In some embodiments, provided oligonucleotides comprise 12 or more consecutive 2′-F. In some embodiments, provided oligonucleotides comprise 13 or more consecutive 2′-F. In some embodiments, provided oligonucleotides comprise 14 or more consecutive 2′-F. In some embodiments, provided oligonucleotides comprise 15 or more consecutive 2′-F. In some embodiments, provided oligonucleotides comprise 16 or more consecutive 2′-F. In some embodiments, provided oligonucleotides comprise 17 or more consecutive 2′-F. In some embodiments, provided oligonucleotides comprise 18 or more consecutive 2′-F. In some embodiments, provided oligonucleotides comprise 19 or more consecutive 2′-F. In some embodiments, provided oligonucleotides comprise 20 or more consecutive 2′-F. In some embodiments, provided oligonucleotides comprise 21 or more consecutive 2′-F. In some embodiments, provided oligonucleotides comprise 22 or more consecutive 2′-F. In some embodiments, provided oligonucleotides comprise 23 or more consecutive 2′-F. In some embodiments, provided oligonucleotides comprise 24 or more consecutive 2′-F. In some embodiments, provided oligonucleotides comprise 25 or more consecutive 2′-F. In some embodiments, provided oligonucleotides comprise 30 or more consecutive 2′-F. In some embodiments, provided oligonucleotides comprise 35 or more consecutive 2′-F.

[0819] In some embodiments, provided oligonucleotides comprise one consecutive 2′-F. In some embodiments, provided oligonucleotides comprise two consecutive 2′-F. In some embodiments, provided oligonucleotides comprise three consecutive 2′-F. In some embodiments, provided oligonucleotides comprise four consecutive 2′-F. In some embodiments, provided oligonucleotides comprise five consecutive 2′-F. In some embodiments, provided oligonucleotides comprise six consecutive 2′-F. In some embodiments, provided oligonucleotides comprise seven consecutive 2′-F. In some embodiments, provided oligonucleotides comprise eight consecutive 2′-F. In some embodiments, provided oligonucleotides comprise nine consecutive 2′-F. In some embodiments, provided oligonucleotides comprise ten consecutive 2′-F. In some embodiments, provided oligonucleotides comprise 11 consecutive 2′-F. In some embodiments, provided oligonucleotides comprise 12 consecutive 2′-F. In some embodiments, provided oligonucleotides comprise 13 consecutive 2′-F. In some embodiments, provided oligonucleotides comprise 14 consecutive 2′-F. In some embodiments, provided oligonucleotides comprise 15 consecutive 2′-F. In some embodiments, provided oligonucleotides comprise 16 consecutive 2′-F. In some embodiments, provided oligonucleotides comprise 17 consecutive 2′-F. In some embodiments, provided oligonucleotides comprise 18 consecutive 2′-F. In some embodiments, provided oligonucleotides comprise 19 consecutive 2′-F. In some embodiments, provided oligonucleotides comprise 20 consecutive 2′-F. In some embodiments, provided oligonucleotides comprise 21 consecutive 2′-F. In some embodiments, provided oligonucleotides comprise 22 consecutive 2′-F. In some embodiments, provided oligonucleotides comprise 23 consecutive 2′-F. In some embodiments, provided oligonucleotides comprise 24 consecutive 2′-F. In some embodiments, provided oligonucleotides comprise 25 consecutive 2′-F. In some embodiments, provided oligonucleotides comprise 30 consecutive 2′-F. In some embodiments, provided oligonucleotides comprise 35 consecutive 2′-F.

[0820] In some embodiments, a nucleoside comprising a 2′-modification is followed by a modified internucleotidic linkage. In some embodiments, a nucleoside comprising a 2′-modification is preceded by a modified internucleotidic linkage. In some embodiments, a modified internucleotidic linkage is a chiral internucleotidic linkage. In some embodiments, a modified internucleotidic linkage is a phosphorothioate. In some embodiments, a chiral internucleotidic linkage is Sp. In some embodiments, a nucleoside comprising a 2′-modification is followed by an Sp chiral internucleotidic linkage. In some embodiments, a nucleoside comprising a 2′-F is followed by an Sp chiral internucleotidic linkage. In some embodiments, a nucleoside comprising a 2′-modification is preceded by an Sp chiral internucleotidic linkage. In some embodiments, a nucleoside comprising a 2′-F is preceded by an Sp chiral internucleotidic linkage. In some embodiments, a chiral internucleotidic linkage is Rp. In some embodiments, a nucleoside comprising a 2′-modification is followed by an Rp chiral internucleotidic linkage. In some embodiments, a nucleoside comprising a 2′-F is followed by an Rp chiral internucleotidic linkage. In some embodiments, a nucleoside comprising a 2′-modification is preceded by an Rp chiral internucleotidic linkage. In some embodiments, a nucleoside comprising a 2′-Fis preceded by an Rp chiral internucleotidic linkage.

[0821] In some embodiments, provided oligonucleotides comprise one or more natural phosphate linkages and one or more modified internucleotidic linkages.

[0822] Provided oligonucleotides can comprise various number of natural phosphate linkages. In some embodiments, provided oligonucleotides comprise no natural phosphate linkages. In some embodiments, provided oligonucleotides comprise one natural phosphate linkage. In some embodiments, provided oligonucleotides comprise 2 or more natural phosphate linkages. In some embodiments, provided oligonucleotides comprise 3 or more natural phosphate linkages. In some embodiments, provided oligonucleotides comprise 4 or more natural phosphate linkages. In some embodiments, provided oligonucleotides comprise 5 or more natural phosphate linkages. In some embodiments, provided oligonucleotides comprise 6 or more natural phosphate linkages. In some embodiments, provided oligonucleotides comprise 7 or more natural phosphate linkages. In some embodiments, provided oligonucleotides comprise 8 or more natural phosphate linkages. In some embodiments, provided oligonucleotides comprise 9 or more natural phosphate linkages. In some embodiments, provided oligonucleotides comprise 10 or more natural phosphate linkages. In some embodiments, provided oligonucleotides comprise 15 or more natural phosphate linkages. In some embodiments, provided oligonucleotides comprise 20 or more natural phosphate linkages. In some embodiments, provided oligonucleotides comprise 25 or more natural phosphate linkages. In some embodiments, provided oligonucleotides comprise 30 or more natural phosphate linkages.

[0823] Provided oligonucleotides can comprise various numbers of consecutive chiral internucleotidic linkages. In some embodiments, provided oligonucleotides comprise no consecutive chiral internucleotidic linkages. In some embodiments, provided oligonucleotides comprise one consecutive chiral internucleotidic linkage. In some embodiments, provided oligonucleotides comprise 2 or more consecutive chiral internucleotidic linkages. In some embodiments, provided oligonucleotides comprise 3 or more consecutive chiral internucleotidic linkages. In some embodiments, provided oligonucleotides comprise 4 or more consecutive chiral internucleotidic linkages. In some embodiments, provided oligonucleotides comprise 5 or more consecutive chiral internucleotidic linkages. In some embodiments, provided oligonucleotides comprise 6 or more consecutive chiral internucleotidic linkages. In some embodiments, provided oligonucleotides comprise 7 or more consecutive chiral internucleotidic linkages. In some embodiments, provided oligonucleotides comprise 8 or more consecutive chiral internucleotidic linkages. In some embodiments, provided oligonucleotides comprise 9 or more consecutive chiral internucleotidic linkages. In some embodiments, provided oligonucleotides comprise 10 or more consecutive chiral internucleotidic linkages. In some embodiments, provided oligonucleotides comprise 15 or more consecutive chiral internucleotidic linkages. In some embodiments, provided oligonucleotides comprise 20 or more consecutive chiral internucleotidic linkages. In some embodiments, provided oligonucleotides comprise 25 or more consecutive chiral internucleotidic linkages. In some embodiments, provided oligonucleotides comprise 30 or more consecutive chiral internucleotidic linkages.

[0824] Provided oligonucleotides can comprise various numbers of consecutive achiral internucleotidic linkages. In some embodiments, provided oligonucleotides comprise no consecutive achiral internucleotidic linkages. In some embodiments, provided oligonucleotides comprise one consecutive achiral internucleotidic linkage. In some embodiments, provided oligonucleotides comprise 2 or more consecutive achiral internucleotidic linkages. In some embodiments, provided oligonucleotides comprise 3 or more consecutive achiral internucleotidic linkages. In some embodiments, provided oligonucleotides comprise 4 or more consecutive achiral internucleotidic linkages. In some embodiments, provided oligonucleotides comprise 5 or more consecutive achiral internucleotidic linkages. In some embodiments, provided oligonucleotides comprise 6 or more consecutive achiral internucleotidic linkages. In some embodiments, provided oligonucleotides comprise 7 or more consecutive achiral internucleotidic linkages. In some embodiments, provided oligonucleotides comprise 8 or more consecutive achiral internucleotidic linkages. In some embodiments, provided oligonucleotides comprise 9 or more consecutive achiral internucleotidic linkages. In some embodiments, provided oligonucleotides comprise 10 or more consecutive achiral internucleotidic linkages. In some embodiments, provided oligonucleotides comprise 15 or more consecutive achiral internucleotidic linkages. In some embodiments, provided oligonucleotides comprise 20 or more consecutive achiral internucleotidic linkages. In some embodiments, provided oligonucleotides comprise 25 or more consecutive achiral internucleotidic linkages. In some embodiments, provided oligonucleotides comprise 30 or more consecutive achiral internucleotidic linkages.

[0825] In some embodiments, 5% or more of the internucleotidic linkages of provided oligonucleotides are natural phosphate linkages. In some embodiments, 10% or more of the internucleotidic linkages of provided oligonucleotides are natural phosphate linkages. In some embodiments, 15% or more of the internucleotidic linkages of provided oligonucleotides are natural phosphate linkages. In some embodiments, 20% or more of the internucleotidic linkages of provided oligonucleotides are natural phosphate linkages. In some embodiments, 25% or more of the internucleotidic linkages of provided oligonucleotides are natural phosphate linkages. In some embodiments, 30% or more of the internucleotidic linkages of provided oligonucleotides are natural phosphate linkages. In some embodiments, 35% or more of the internucleotidic linkages of provided oligonucleotides are natural phosphate linkages. In some embodiments, 40% or more of the internucleotidic linkages of provided oligonucleotides are natural phosphate linkages. In some embodiments, 45% or more of the internucleotidic linkages of provided oligonucleotides are natural phosphate linkages. In some embodiments, 50% or more of the internucleotidic linkages of provided oligonucleotides are natural phosphate linkages. In some embodiments, 55% or more of the internucleotidic linkages of provided oligonucleotides are natural phosphate linkages. In some embodiments, 60% or more of the internucleotidic linkages of provided oligonucleotides are natural phosphate linkages. In some embodiments, 65% or more of the internucleotidic linkages of provided oligonucleotides are natural phosphate linkages. In some embodiments, 70% or more of the internucleotidic linkages of provided oligonucleotides are natural phosphate linkages. In some embodiments, 75% or more of the internucleotidic linkages of provided oligonucleotides are natural phosphate linkages. In some embodiments, 80% or more of the internucleotidic linkages of provided oligonucleotides are natural phosphate linkages. In some embodiments, 85% or more of the internucleotidic linkages of provided oligonucleotides are natural phosphate linkages. In some embodiments, 90% or more of the internucleotidic linkages of provided oligonucleotides are natural phosphate linkages. In some embodiments, 95% or more of the internucleotidic linkages of provided oligonucleotides are natural phosphate linkages.

[0826] In some embodiments, provided oligonucleotides comprise no more than about 25 consecutive unmodified sugar moieties. In some embodiments, provided oligonucleotides comprise no more than about 20 consecutive unmodified sugar moieties. In some embodiments, provided oligonucleotides comprise no more than about 15 consecutive unmodified sugar moieties. In some embodiments, provided oligonucleotides comprise no more than about 10 consecutive unmodified sugar moieties. In some embodiments, provided oligonucleotides comprise no more than about 9 consecutive unmodified sugar moieties. In some embodiments, provided oligonucleotides comprise no more than about 8 consecutive unmodified sugar moieties. In some embodiments, provided oligonucleotides comprise no more than about 7 consecutive unmodified sugar moieties. In some embodiments, provided oligonucleotides comprise no more than about 6 consecutive unmodified sugar moieties. In some embodiments, provided oligonucleotides comprise no more than about 5 consecutive unmodified sugar moieties. In some embodiments, provided oligonucleotides comprise no more than about 4 consecutive unmodified sugar moieties. In some embodiments, provided oligonucleotides comprise no more than about 3 consecutive unmodified sugar moieties. In some embodiments, provided oligonucleotides comprise no more than about 2 consecutive unmodified sugar moieties. In some embodiments, provided oligonucleotides comprise no more than about 25 unmodified sugar moieties. In some embodiments, provided oligonucleotides comprise no more than about 20 unmodified sugar moieties. In some embodiments, provided oligonucleotides comprise no more than about 15 unmodified sugar moieties. In some embodiments, provided oligonucleotides comprise no more than about 10 unmodified sugar moieties. In some embodiments, provided oligonucleotides comprise no more than about 5 unmodified sugar moieties.

[0827] In some embodiments, provided oligonucleotides comprise no more than about 95% unmodified sugar moieties. In some embodiments, provided oligonucleotides comprise no more than about 90% unmodified sugar moieties. In some embodiments, provided oligonucleotides comprise no more than about 85% unmodified sugar moieties. In some embodiments, provided oligonucleotides comprise no more than about 80% unmodified sugar moieties. In some embodiments, provided oligonucleotides comprise no more than about 70% unmodified sugar moieties. In some embodiments, provided oligonucleotides comprise no more than about 60% unmodified sugar moieties. In some embodiments, provided oligonucleotides comprise no more than about 50% unmodified sugar moieties. In some embodiments, provided oligonucleotides comprise no more than about 40% unmodified sugar moieties. In some embodiments, provided oligonucleotides comprise no more than about 30% unmodified sugar moieties. In some embodiments, provided oligonucleotides comprise no more than about 20% unmodified sugar moieties. In some embodiments, provided oligonucleotides comprise no more than about 10% unmodified sugar moieties. In some embodiments, provided oligonucleotides comprise no more than about 5% unmodified sugar moieties. In some embodiments, provided oligonucleotides comprise no more than about 15 consecutive unmodified sugar moieties. In some embodiments, provided oligonucleotides comprise no more than about 10 consecutive unmodified sugar moieties. In some embodiments, provided oligonucleotides comprise no more than about 9 consecutive unmodified sugar moieties. In some embodiments, provided oligonucleotides comprise no more than about 8 consecutive unmodified sugar moieties. In some embodiments, provided oligonucleotides comprise no more than about 7 consecutive unmodified sugar moieties. In some embodiments, provided oligonucleotides comprise no more than about 6 consecutive unmodified sugar moieties. In some embodiments, provided oligonucleotides comprise no more than about 5 consecutive unmodified sugar moieties. In some embodiments, provided oligonucleotides comprise no more than about 4 consecutive unmodified sugar moieties. In some embodiments, provided oligonucleotides comprise no more than about 3 consecutive unmodified sugar moieties. In some embodiments, provided oligonucleotides comprise no more than about 2 consecutive unmodified sugar moieties. In some embodiments, provided oligonucleotides comprise no more than about 25 unmodified sugar moieties. In some embodiments, provided oligonucleotides comprise no more than about 20 unmodified sugar moieties. In some embodiments, provided oligonucleotides comprise no more than about 15 unmodified sugar moieties. In some embodiments, provided oligonucleotides comprise no more than about 10 unmodified sugar moieties. In some embodiments, provided oligonucleotides comprise no more than about 5 unmodified sugar moieties.

[0828] In some embodiments, provided oligonucleotides comprise no more than about 95% unmodified sugar moieties. In some embodiments, provided oligonucleotides comprise no more than about 90% unmodified sugar moieties. In some embodiments, provided oligonucleotides comprise no more than about 85% unmodified sugar moieties. In some embodiments, provided oligonucleotides comprise no more than about 80% unmodified sugar moieties. In some embodiments, provided oligonucleotides comprise no more than about 70% unmodified sugar moieties. In some embodiments, provided oligonucleotides comprise no more than about 60% unmodified sugar moieties. In some embodiments, provided oligonucleotides comprise no more than about 50% unmodified sugar moieties. In some embodiments, provided oligonucleotides comprise no more than about 40% unmodified sugar moieties. In some embodiments, provided oligonucleotides comprise no more than about 30% unmodified sugar moieties. In some embodiments, provided oligonucleotides comprise no more than about 20% unmodified sugar moieties. In some embodiments, provided oligonucleotides comprise no more than about 10% unmodified sugar moieties. In some embodiments, provided oligonucleotides comprise no more than about 5% unmodified sugar moieties. In some embodiments, each sugar moiety of the oligonucleotides of the first plurality is independently modified.

[0829] In some embodiments, provided oligonucleotides comprise two or more modified internucleotidic linkages. In some embodiments, provided oligonucleotides comprise three or more modified internucleotidic linkages. In some embodiments, provided oligonucleotides comprise four or more modified internucleotidic linkages. In some embodiments, provided oligonucleotides comprise five or more modified internucleotidic linkages. In some embodiments, provided oligonucleotides comprise ten or more modified internucleotidic linkages. In some embodiments, provided oligonucleotides comprise about 15 or more modified internucleotidic linkages. In some embodiments, provided oligonucleotides comprise about 20 or more modified internucleotidic linkages. In some embodiments, provided oligonucleotides comprise about 25 or more modified internucleotidic linkages.

[0830] In some embodiments, about 5% of the internucleotidic linkages in provided oligonucleotides are modified internucleotidic linkages. In some embodiments, about 10% of the internucleotidic linkages in provided oligonucleotides are modified internucleotidic linkages. In some embodiments, about 20% of the internucleotidic linkages in provided oligonucleotides are modified internucleotidic linkages. In some embodiments, about 30% of the internucleotidic linkages in provided oligonucleotides are modified internucleotidic linkages. In some embodiments, about 40% of the internucleotidic linkages in provided oligonucleotides are modified internucleotidic linkages. In some embodiments, about 50% of the internucleotidic linkages in provided oligonucleotides are modified internucleotidic linkages. In some embodiments, about 60% of the internucleotidic linkages in provided oligonucleotides are modified internucleotidic linkages. In some embodiments, about 70% of the internucleotidic linkages in provided oligonucleotides are modified internucleotidic linkages. In some embodiments, about 80% of the internucleotidic linkages in provided oligonucleotides are modified internucleotidic linkages. In some embodiments, about 85% of the internucleotidic linkages in provided oligonucleotides are modified internucleotidic linkages. In some embodiments, about 90% of the internucleotidic linkages in provided oligonucleotides are modified internucleotidic linkages. In some embodiments, about 95% of the internucleotidic linkages in provided oligonucleotides are modified internucleotidic linkages.

[0831] In some embodiments, provided oligonucleotides comprise no more than about 25 consecutive natural phosphate linkages. In some embodiments, provided oligonucleotides comprise no more than about 20 consecutive natural phosphate linkages. In some embodiments, provided oligonucleotides comprise no more than about 15 consecutive natural phosphate linkages. In some embodiments, provided oligonucleotides comprise no more than about 10 consecutive natural phosphate linkages. In some embodiments, provided oligonucleotides comprise no more than about 9 consecutive natural phosphate linkages. In some embodiments, provided oligonucleotides comprise no more than about 8 consecutive natural phosphate linkages. In some embodiments, provided oligonucleotides comprise no more than about 7 consecutive natural phosphate linkages. In some embodiments, provided oligonucleotides comprise no more than about 6 consecutive natural phosphate linkages. In some embodiments, provided oligonucleotides comprise no more than about 5 consecutive natural phosphate linkages. In some embodiments, provided oligonucleotides comprise no more than about 4 consecutive natural phosphate linkages. In some embodiments, provided oligonucleotides comprise no more than about 3 consecutive natural phosphate linkages. In some embodiments, provided oligonucleotides comprise no more than about 2 consecutive natural phosphate linkages. In some embodiments, provided oligonucleotides comprise no more than about 25 natural phosphate linkages. In some embodiments, provided oligonucleotides comprise no more than about 20 natural phosphate linkages. In some embodiments, provided oligonucleotides comprise no more than about 15 natural phosphate linkages. In some embodiments, provided oligonucleotides comprise no more than about 10 natural phosphate linkages. In some embodiments, provided oligonucleotides comprise no more than about 5 natural phosphate linkages. In some embodiments, provided oligonucleotides comprise no more than about 95% natural phosphate linkages. In some embodiments, provided oligonucleotides comprise no more than about 90% natural phosphate linkages. In some embodiments, provided oligonucleotides comprise no more than about 85% natural phosphate linkages. In some embodiments, provided oligonucleotides comprise no more than about 80% natural phosphate linkages. In some embodiments, provided oligonucleotides comprise no more than about 70% natural phosphate linkages. In some embodiments, provided oligonucleotides comprise no more than about 60% natural phosphate linkages. In some embodiments, provided oligonucleotides comprise no more than about 50% natural phosphate linkages. In some embodiments, provided oligonucleotides comprise no more than about 40% natural phosphate linkages. In some embodiments, provided oligonucleotides comprise no more than about 30% natural phosphate linkages. In some embodiments, provided oligonucleotides comprise no more than about 20% natural phosphate linkages. In some embodiments, provided oligonucleotides comprise no more than about 10% natural phosphate linkages. In some embodiments, provided oligonucleotides comprise no more than about 5% natural phosphate linkages.

[0832] In some embodiments, provided oligonucleotides comprise no DNA nucleotide.

[0833] A DNA nucleotide is a nucleotide in which the sugar moiety is an unmodified DNA sugar moiety, and the internucleotidic linkage is a natural phosphate linkage. In some embodiments, provided oligonucleotides comprise no more than 2 DNA nucleotides. In some embodiments, provided oligonucleotides comprise no more than 3 DNA nucleotides. In some embodiments, provided oligonucleotides comprise no more than 4 DNA nucleotides. In some embodiments, provided oligonucleotides comprise no more than 5 DNA nucleotides. In some embodiments, provided oligonucleotides comprise no more than 6 DNA nucleotides. In some embodiments, provided oligonucleotides comprise no more than 7 DNA nucleotides. In some embodiments, provided oligonucleotides comprise no more than 8 DNA nucleotides. In some embodiments, provided oligonucleotides comprise no more than 9 DNA nucleotides. In some embodiments, provided oligonucleotides comprise no more than 10 DNA nucleotides. In some embodiments, provided oligonucleotides comprise no more than 11 DNA nucleotides. In some embodiments, provided oligonucleotides comprise no more than 12 DNA nucleotides. In some embodiments, provided oligonucleotides comprise no more than 13 DNA nucleotides. In some embodiments, provided oligonucleotides comprise no more than 14 DNA nucleotides. In some embodiments, provided oligonucleotides comprise no more than 15 DNA nucleotides. In some embodiments, provided oligonucleotides comprise no more than 20 DNA nucleotides. In some embodiments, provided oligonucleotides comprise no more than 25 DNA nucleotides. In some embodiments, provided oligonucleotides comprise no more than 30 DNA nucleotides.

[0834] In some embodiments, provided oligonucleotides comprise no more than 2 consecutive DNA nucleotides. In some embodiments, provided oligonucleotides comprise no more than 3 consecutive DNA nucleotides. In some embodiments, provided oligonucleotides comprise no more than 4 consecutive DNA nucleotides. In some embodiments, provided oligonucleotides comprise no more than 5 consecutive DNA nucleotides. In some embodiments, provided oligonucleotides comprise no more than 6 consecutive DNA nucleotides. In some embodiments, provided oligonucleotides comprise no more than 7 consecutive DNA nucleotides. In some embodiments, provided oligonucleotides comprise no more than 8 consecutive DNA nucleotides. In some embodiments, provided oligonucleotides comprise no more than 9 consecutive DNA nucleotides. In some embodiments, provided oligonucleotides comprise no more than 10 consecutive DNA nucleotides. In some embodiments, provided oligonucleotides comprise no more than 11 consecutive DNA nucleotides. In some embodiments, provided oligonucleotides comprise no more than 12 consecutive DNA nucleotides. In some embodiments, provided oligonucleotides comprise no more than 13 consecutive DNA nucleotides. In some embodiments, provided oligonucleotides comprise no more than 14 consecutive DNA nucleotides. In some embodiments, provided oligonucleotides comprise no more than 15 consecutive DNA nucleotides. In some embodiments, provided oligonucleotides comprise no more than 20 consecutive DNA nucleotides. In some embodiments, provided oligonucleotides comprise no more than 25 consecutive DNA nucleotides. In some embodiments, provided oligonucleotides comprise no more than 30 consecutive DNA nucleotides.

[0835] In some embodiments, compared to a reference condition, provided oligonucleotide compositions are surprisingly effective. In some embodiments, desired biological effects (e.g., as measured by increased levels of desired mRNA, proteins, etc., decreased levels of undesired mRNA, proteins, etc., delivery to target locations, etc.) can be enhanced by more than 5, 10, 15, 20, 25, 30, 40, 50, or 100 folds. In some embodiments, a change is measured by increase of a desired mRNA level compared to a reference condition. In some embodiments, a change is measured by decrease of an undesired mRNA level compared to a reference condition. In some embodiments, a change is measured by increase of delivery to target locations compared to a reference condition. In some embodiments, a reference condition is absence of oligonucleotide treatment. In some embodiments, a reference condition is a stereorandom composition of oligonucleotides having the same base sequence and chemical modifications.

[0836] In some embodiments, a desired biological effect is enhanced by more than 2 folds. In some embodiments, a desired biological effect is enhanced by more than 3 folds. In some embodiments, a desired biological effect is enhanced by more than 4 folds. In some embodiments, a desired biological effect is enhanced by more than 5 folds. In some embodiments, a desired biological effect is enhanced by more than 6 folds. In some embodiments, a desired biological effect is enhanced by more than 7 folds. In some embodiments, a desired biological effect is enhanced by more than 8 folds. In some embodiments, a desired biological effect is enhanced by more than 9 folds. In some embodiments, a desired biological effect is enhanced by more than 10 folds. In some embodiments, a desired biological effect is enhanced by more than 11 folds. In some embodiments, a desired biological effect is enhanced by more than 12 folds. In some embodiments, a desired biological effect is enhanced by more than 13 folds. In some embodiments, a desired biological effect is enhanced by more than 14 folds. In some embodiments, a desired biological effect is enhanced by more than 15 folds. In some embodiments, a desired biological effect is enhanced by more than 20 folds. In some embodiments, a desired biological effect is enhanced by more than 25 folds. In some embodiments, a desired biological effect is enhanced by more than 30 folds. In some embodiments, a desired biological effect is enhanced by more than 35 folds. In some embodiments, a desired biological effect is enhanced by more than 40 folds. In some embodiments, a desired biological effect is enhanced by more than 45 folds. In some embodiments, a desired biological effect is enhanced by more than 50 folds. In some embodiments, a desired biological effect is enhanced by more than 60 folds. In some embodiments, a desired biological effect is enhanced by more than 70 folds. In some embodiments, a desired biological effect is enhanced by more than 80 folds. In some embodiments, a desired biological effect is enhanced by more than 90 folds. In some embodiments, a desired biological effect is enhanced by more than 100 folds. In some embodiments, a desired biological effect is enhanced by more than 200 folds. In some embodiments, a desired biological effect is enhanced by more than 500 folds.

[0837] In some embodiments, provided oligonucleotides comprise two wing and one core regions. In some embodiments, provided oligonucleotides comprises a 5′-wing-core-wing-3′ structure. In some embodiments, provided oligonucleotides are of a 5′-wing-core-wing-3′ gapmer structure. In some embodiments, the two wing regions are identical. In some embodiments, the two wing regions are different. In some embodiments, the two wing regions are identical in chemical modifications. In some embodiments, the two wing regions are identical in 2′-modifications. In some embodiments, the two wing regions are identical in internucleotidic linkage modifications. In some embodiments, the two wing regions are identical in patterns of backbone chiral centers. In some embodiments, the two wing regions are identical in pattern of backbone linkages. In some embodiments, the two wing regions are identical in pattern of backbone linkage types. In some embodiments, the two wing regions are identical in pattern of backbone phosphorus modifications.

[0838] In some embodiments, provided oligonucleotides comprise one wing and one core regions. In some embodiments, provided oligonucleotides comprises a 5′-wing-core-3′ hemimer structure. In some embodiments, provided oligonucleotides are of a 5′-wing-core-3′ hemimer structure. In some embodiments, provided oligonucleotides comprises a 5′-core-wing-3′ hemimer structure. In some embodiments, provided oligonucleotides are of a 5′-core-wing-3′ hemimer structure.

[0839] A wing region can be differentiated from a core region in that a wing region contains a different structure feature than a core region. For example, in some embodiments, a wing region differs from a core region in that they have different sugar modifications, base modifications, internucleotidic linkages, internucleotidic linkage stereochemistry, etc. In some embodiments, a wing region differs from a core region in that they have different 2′-modifications of the sugars.

[0840] In some embodiments, an internucleotidic linkage between a wing region and a core region is considered part of the wing region. In some embodiments, an internucleotidic linkage between a 5′-wing region and a core region is considered part of the wing region. In some embodiments, an internucleotidic linkage between a 3′-wing region and a core region is considered part of the wing region. In some embodiments, an internucleotidic linkage between a wing region and a core region is considered part of the core region. In some embodiments, an internucleotidic linkage between a 5′-wing region and a core region is considered part of the core region. In some embodiments, an internucleotidic linkage between a 3′-wing region and a core region is considered part of the core region.

[0841] In some embodiments, an internucleotidic linkage between a wing region and a core region is considered part of the wing region. In some embodiments, an internucleotidic linkage between a 5′-wing region and a core region is considered part of the wing region. In some embodiments, an internucleotidic linkage between a 3′-wing region and a core region is considered part of the wing region. In some embodiments, an internucleotidic linkage between a wing region and a core region is considered part of the core region. In some embodiments, an internucleotidic linkage between a 5′-wing region and a core region is considered part of the core region. In some embodiments, an internucleotidic linkage between a 3′-wing region and a core region is considered part of the core region.

[0842] In some embodiments, a wing region comprises 2 or more nucleosides. In some embodiments, a wing region comprises 3 or more nucleosides. In some embodiments, a wing region comprises 4 or more nucleosides. In some embodiments, a wing region comprises 5 or more nucleosides. In some embodiments, a wing region comprises 6 or more nucleosides. In some embodiments, a wing region comprises 7 or more nucleosides. In some embodiments, a wing region comprises 8 or more nucleosides. In some embodiments, a wing region comprises 9 or more nucleosides. In some embodiments, a wing region comprises 10 or more nucleosides. In some embodiments, a wing region comprises 11 or more nucleosides. In some embodiments, a wing region comprises 12 or more nucleosides. In some embodiments, a wing region comprises 13 or more nucleosides. In some embodiments, a wing region comprises 14 or more nucleosides. In some embodiments, a wing region comprises 15 or more nucleosides.

[0843] In some embodiments, a wing region comprises 2 or more modified internucleotidic linkages. In some embodiments, a wing region comprises 3 or more modified internucleotidic linkages. In some embodiments, a wing region comprises 4 or more modified internucleotidic linkages. In some embodiments, a wing region comprises 5 or more modified internucleotidic linkages. In some embodiments, a wing region comprises 6 or more modified internucleotidic linkages. In some embodiments, a wing region comprises 7 or more modified internucleotidic linkages. In some embodiments, a wing region comprises 8 or more modified internucleotidic linkages. In some embodiments, a wing region comprises 9 or more modified internucleotidic linkages. In some embodiments, a wing region comprises 10 or more modified internucleotidic linkages. In some embodiments, a wing region comprises 11 or more modified internucleotidic linkages. In some embodiments, a wing region comprises 12 or more modified internucleotidic linkages. In some embodiments, a wing region comprises 13 or more modified internucleotidic linkages. In some embodiments, a wing region comprises 14 or more modified internucleotidic linkages. In some embodiments, a wing region comprises 15 or more modified internucleotidic linkages.

[0844] In some embodiments, a chiral internucleotidic linkage or a modified internucleotidic linkage has the structure of formula I. In some embodiments, a chiral internucleotidic linkage or a modified internucleotidic linkage is phosphorothioate. In some embodiments, each chiral internucleotidic linkage or a modified internucleotidic linkage independently has the structure of formula I. In some embodiments, each chiral internucleotidic linkage or a modified internucleotidic linkage is phosphorothioate.

[0845] In some embodiments, a wing region comprises 2 or more consecutive modified internucleotidic linkages. In some embodiments, a wing region comprises 3 or more consecutive modified internucleotidic linkages. In some embodiments, a wing region comprises 4 or more consecutive modified internucleotidic linkages. In some embodiments, a wing region comprises 5 or more consecutive modified internucleotidic linkages. In some embodiments, a wing region comprises 6 or more consecutive modified internucleotidic linkages. In some embodiments, a wing region comprises 7 or more consecutive modified internucleotidic linkages. In some embodiments, a wing region comprises 8 or more consecutive modified internucleotidic linkages. In some embodiments, a wing region comprises 9 or more consecutive modified internucleotidic linkages. In some embodiments, a wing region comprises 10 or more consecutive modified internucleotidic linkages. In some embodiments, a wing region comprises 11 or more consecutive modified internucleotidic linkages. In some embodiments, a wing region comprises 12 or more consecutive modified internucleotidic linkages. In some embodiments, a wing region comprises 13 or more consecutive modified internucleotidic linkages. In some embodiments, a wing region comprises 14 or more consecutive modified internucleotidic linkages. In some embodiments, a wing region comprises 15 or more consecutive modified internucleotidic linkages. In some embodiments, each internucleotidic linkage in a wing region is independently a modified internucleotidic linkage.

[0846] In some embodiments, 5% or more of the internucleotidic linkages of provided oligonucleotides are modified internucleotidic linkages. In some embodiments, 10% or more of the internucleotidic linkages of provided oligonucleotides are modified internucleotidic linkages. In some embodiments, 15% or more of the internucleotidic linkages of provided oligonucleotides are modified internucleotidic linkages. In some embodiments, 20% or more of the internucleotidic linkages of provided oligonucleotides are modified internucleotidic linkages. In some embodiments, 25% or more of the internucleotidic linkages of provided oligonucleotides are modified internucleotidic linkages. In some embodiments, 30% or more of the internucleotidic linkages of provided oligonucleotides are modified internucleotidic linkages. In some embodiments, 35% or more of the internucleotidic linkages of provided oligonucleotides are modified internucleotidic linkages. In some embodiments, 40% or more of the internucleotidic linkages of provided oligonucleotides are modified internucleotidic linkages. In some embodiments, 45% or more of the internucleotidic linkages of a wing region are modified internucleotidic linkages. In some embodiments, 50% or more of the internucleotidic linkages of a wing region are modified internucleotidic linkages. In some embodiments, 55% or more of the internucleotidic linkages of a wing region are modified internucleotidic linkages. In some embodiments, 60% or more of the internucleotidic linkages of a wing region are modified internucleotidic linkages. In some embodiments, 65% or more of the internucleotidic linkages of a wing region are modified internucleotidic linkages. In some embodiments, 70% or more of the internucleotidic linkages of a wing region are modified internucleotidic linkages. In some embodiments, 75% or more of the internucleotidic linkages of a wing region are modified internucleotidic linkages. In some embodiments, 80% or more of the internucleotidic linkages of a wing region are modified internucleotidic linkages. In some embodiments, 85% or more of the internucleotidic linkages of a wing region are modified internucleotidic linkages. In some embodiments, 90% or more of the internucleotidic linkages of a wing region are modified internucleotidic linkages. In some embodiments, 95% or more of the internucleotidic linkages of a wing region are modified internucleotidic linkages. In some embodiments, each internucleotidic linkage of a wing region is a modified internucleotidic linkage.

[0847] In some embodiments, a wing region comprises 2 or more natural phosphate linkages. In some embodiments, a wing region comprises 3 or more natural phosphate linkages. In some embodiments, a wing region comprises 4 or more natural phosphate linkages. In some embodiments, a wing region comprises 5 or more natural phosphate linkages. In some embodiments, a wing region comprises 6 or more natural phosphate linkages. In some embodiments, a wing region comprises 7 or more natural phosphate linkages. In some embodiments, a wing region comprises 8 or more natural phosphate linkages. In some embodiments, a wing region comprises 9 or more natural phosphate linkages. In some embodiments, a wing region comprises 10 or more natural phosphate linkages. In some embodiments, a wing region comprises 11 or more natural phosphate linkages. In some embodiments, a wing region comprises 12 or more natural phosphate linkages. In some embodiments, a wing region comprises 13 or more natural phosphate linkages. In some embodiments, a wing region comprises 14 or more natural phosphate linkages. In some embodiments, a wing region comprises 15 or more natural phosphate linkages. In some embodiments, a wing region comprises 2 or more consecutive natural phosphate linkages. In some embodiments, a wing region comprises 3 or more consecutive natural phosphate linkages. In some embodiments, a wing region comprises 4 or more consecutive natural phosphate linkages. In some embodiments, a wing region comprises 5 or more consecutive natural phosphate linkages. In some embodiments, a wing region comprises 6 or more consecutive natural phosphate linkages. In some embodiments, a wing region comprises 7 or more consecutive natural phosphate linkages. In some embodiments, a wing region comprises 8 or more consecutive natural phosphate linkages. In some embodiments, a wing region comprises 9 or more consecutive natural phosphate linkages. In some embodiments, a wing region comprises 10 or more consecutive natural phosphate linkages. In some embodiments, a wing region comprises 11 or more consecutive natural phosphate linkages. In some embodiments, a wing region comprises 12 or more consecutive natural phosphate linkages. In some embodiments, a wing region comprises 13 or more consecutive natural phosphate linkages. In some embodiments, a wing region comprises 14 or more consecutive natural phosphate linkages. In some embodiments, a wing region comprises 15 or more consecutive natural phosphate linkages. In some embodiments, each internucleotidic linkage in a wing region is independently a natural phosphate linkage.

[0848] In some embodiments, 5% or more of the internucleotidic linkages of provided oligonucleotides are natural phosphate linkages. In some embodiments, 10% or more of the internucleotidic linkages of provided oligonucleotides are natural phosphate linkages. In some embodiments, 15% or more of the internucleotidic linkages of provided oligonucleotides are natural phosphate linkages. In some embodiments, 20% or more of the internucleotidic linkages of provided oligonucleotides are natural phosphate linkages. In some embodiments, 25% or more of the internucleotidic linkages of provided oligonucleotides are natural phosphate linkages. In some embodiments, 30% or more of the internucleotidic linkages of provided oligonucleotides are natural phosphate linkages. In some embodiments, 35% or more of the internucleotidic linkages of provided oligonucleotides are natural phosphate linkages. In some embodiments, 40% or more of the internucleotidic linkages of provided oligonucleotides are natural phosphate linkages. In some embodiments, 45% or more of the internucleotidic linkages of a wing region are natural phosphate linkages. In some embodiments, 50% or more of the internucleotidic linkages of a wing region are natural phosphate linkages. In some embodiments, 55% or more of the internucleotidic linkages of a wing region are natural phosphate linkages. In some embodiments, 60% or more of the internucleotidic linkages of a wing region are natural phosphate linkages. In some embodiments, 65% or more of the internucleotidic linkages of a wing region are natural phosphate linkages. In some embodiments, 70% or more of the internucleotidic linkages of a wing region are natural phosphate linkages. In some embodiments, 75% or more of the internucleotidic linkages of a wing region are natural phosphate linkages. In some embodiments, 80% or more of the internucleotidic linkages of a wing region are natural phosphate linkages. In some embodiments, 85% or more of the internucleotidic linkages of a wing region are natural phosphate linkages. In some embodiments, 90% or more of the internucleotidic linkages of a wing region are natural phosphate linkages. In some embodiments, 95% or more of the internucleotidic linkages of a wing region are natural phosphate linkages. In some embodiments, each internucleotidic linkage of a wing region is a natural phosphate linkage.

[0849] In some embodiments, a core region comprises 2 or more modified internucleotidic linkages. In some embodiments, a core region comprises 3 or more modified internucleotidic linkages. In some embodiments, a core region comprises 4 or more modified internucleotidic linkages. In some embodiments, a core region comprises 5 or more modified internucleotidic linkages. In some embodiments, a core region comprises 6 or more modified internucleotidic linkages. In some embodiments, a core region comprises 7 or more modified internucleotidic linkages. In some embodiments, a core region comprises 8 or more modified internucleotidic linkages. In some embodiments, a core region comprises 9 or more modified internucleotidic linkages. In some embodiments, a core region comprises 10 or more modified internucleotidic linkages. In some embodiments, a core region comprises 11 or more modified internucleotidic linkages. In some embodiments, a core region comprises 12 or more modified internucleotidic linkages. In some embodiments, a core region comprises 13 or more modified internucleotidic linkages. In some embodiments, a core region comprises 14 or more modified internucleotidic linkages. In some embodiments, a core region comprises 15 or more modified internucleotidic linkages. In some embodiments, a core region comprises 2 or more consecutive modified internucleotidic linkages. In some embodiments, a core region comprises 3 or more consecutive modified internucleotidic linkages. In some embodiments, a core region comprises 4 or more consecutive modified internucleotidic linkages. In some embodiments, a core region comprises 5 or more consecutive modified internucleotidic linkages. In some embodiments, a core region comprises 6 or more consecutive modified internucleotidic linkages. In some embodiments, a core region comprises 7 or more consecutive modified internucleotidic linkages. In some embodiments, a core region comprises 8 or more consecutive modified internucleotidic linkages. In some embodiments, a core region comprises 9 or more consecutive modified internucleotidic linkages. In some embodiments, a core region comprises 10 or more consecutive modified internucleotidic linkages. In some embodiments, a core region comprises 11 or more consecutive modified internucleotidic linkages. In some embodiments, a core region comprises 12 or more consecutive modified internucleotidic linkages. In some embodiments, a core region comprises 13 or more consecutive modified internucleotidic linkages. In some embodiments, a core region comprises 14 or more consecutive modified internucleotidic linkages. In some embodiments, a core region comprises 15 or more consecutive modified internucleotidic linkages. In some embodiments, each internucleotidic linkage in a core region is independently a modified internucleotidic linkage.

[0850] In some embodiments, 5% or more of the internucleotidic linkages of provided oligonucleotides are modified internucleotidic linkages. In some embodiments, 10% or more of the internucleotidic linkages of provided oligonucleotides are modified internucleotidic linkages. In some embodiments, 15% or more of the internucleotidic linkages of provided oligonucleotides are modified internucleotidic linkages. In some embodiments, 20% or more of the internucleotidic linkages of provided oligonucleotides are modified internucleotidic linkages. In some embodiments, 25% or more of the internucleotidic linkages of provided oligonucleotides are modified internucleotidic linkages. In some embodiments, 30% or more of the internucleotidic linkages of provided oligonucleotides are modified internucleotidic linkages. In some embodiments, 35% or more of the internucleotidic linkages of provided oligonucleotides are modified internucleotidic linkages. In some embodiments, 40% or more of the internucleotidic linkages of provided oligonucleotides are modified internucleotidic linkages. In some embodiments, 45% or more of the internucleotidic linkages of a core region are modified internucleotidic linkages. In some embodiments, 50% or more of the internucleotidic linkages of a core region are modified internucleotidic linkages. In some embodiments, 55% or more of the internucleotidic linkages of a core region are modified internucleotidic linkages. In some embodiments, 60% or more of the internucleotidic linkages of a core region are modified internucleotidic linkages. In some embodiments, 65% or more of the internucleotidic linkages of a core region are modified internucleotidic linkages. In some embodiments, 70% or more of the internucleotidic linkages of a core region are modified internucleotidic linkages. In some embodiments, 75% or more of the internucleotidic linkages of a core region are modified internucleotidic linkages. In some embodiments, 80% or more of the internucleotidic linkages of a core region are modified internucleotidic linkages. In some embodiments, 85% or more of the internucleotidic linkages of a core region are modified internucleotidic linkages. In some embodiments, 90% or more of the internucleotidic linkages of a core region are modified internucleotidic linkages. In some embodiments, 95% or more of the internucleotidic linkages of a core region are modified internucleotidic linkages. In some embodiments, each internucleotidic linkage of a core region is a modified internucleotidic linkage.

[0851] Provided oligonucleotides can comprise various number of modified internucleotidic linkages. In some embodiments, provided oligonucleotides comprise one modified internucleotidic linkage. In some embodiments, provided oligonucleotides comprise 2 or more modified internucleotidic linkages. In some embodiments, provided oligonucleotides comprise 3 or more modified internucleotidic linkages. In some embodiments, provided oligonucleotides comprise 4 or more modified internucleotidic linkages. In some embodiments, provided oligonucleotides comprise 5 or more modified internucleotidic linkages. In some embodiments, provided oligonucleotides comprise 6 or more modified internucleotidic linkages. In some embodiments, provided oligonucleotides comprise 7 or more modified internucleotidic linkages. In some embodiments, provided oligonucleotides comprise 8 or more modified internucleotidic linkages. In some embodiments, provided oligonucleotides comprise 9 or more modified internucleotidic linkages. In some embodiments, provided oligonucleotides comprise 10 or more modified internucleotidic linkages. In some embodiments, provided oligonucleotides comprise 15 or more modified internucleotidic linkages. In some embodiments, provided oligonucleotides comprise 20 or more modified internucleotidic linkages. In some embodiments, provided oligonucleotides comprise 25 or more modified internucleotidic linkages. In some embodiments, provided oligonucleotides comprise 30 or more modified internucleotidic linkages.

[0852] In some embodiments, 5% or more of the internucleotidic linkages of provided oligonucleotides are modified internucleotidic linkages. In some embodiments, 10% or more of the internucleotidic linkages of provided oligonucleotides are modified internucleotidic linkages. In some embodiments, 15% or more of the internucleotidic linkages of provided oligonucleotides are modified internucleotidic linkages. In some embodiments, 20% or more of the internucleotidic linkages of provided oligonucleotides are modified internucleotidic linkages. In some embodiments, 25% or more of the internucleotidic linkages of provided oligonucleotides are modified internucleotidic linkages. In some embodiments, 30% or more of the internucleotidic linkages of provided oligonucleotides are modified internucleotidic linkages. In some embodiments, 35% or more of the internucleotidic linkages of provided oligonucleotides are modified internucleotidic linkages. In some embodiments, 40% or more of the internucleotidic linkages of provided oligonucleotides are modified internucleotidic linkages. In some embodiments, 45% or more of the internucleotidic linkages of provided oligonucleotides are modified internucleotidic linkages. In some embodiments, 50% or more of the internucleotidic linkages of provided oligonucleotides are modified internucleotidic linkages. In some embodiments, 55% or more of the internucleotidic linkages of provided oligonucleotides are modified internucleotidic linkages. In some embodiments, 60% or more of the internucleotidic linkages of provided oligonucleotides are modified internucleotidic linkages. In some embodiments, 65% or more of the internucleotidic linkages of provided oligonucleotides are modified internucleotidic linkages. In some embodiments, 70% or more of the internucleotidic linkages of provided oligonucleotides are modified internucleotidic linkages. In some embodiments, 75% or more of the internucleotidic linkages of provided oligonucleotides are modified internucleotidic linkages. In some embodiments, 80% or more of the internucleotidic linkages of provided oligonucleotides are modified internucleotidic linkages. In some embodiments, 85% or more of the internucleotidic linkages of provided oligonucleotides are modified internucleotidic linkages. In some embodiments, 90% or more of the internucleotidic linkages of provided oligonucleotides are modified internucleotidic linkages. In some embodiments, 95% or more of the internucleotidic linkages of provided oligonucleotides are modified internucleotidic linkages. In some embodiments, each internucleotidic linkage of provided oligonucleotides is a modified internucleotidic linkage.

[0853] In some embodiments, the present disclosure provides a chirally controlled oligonucleotide composition comprising one or more lipids, and a first plurality of oligonucleotides defined by having:
[0854] 1) a common base sequence and length;
[0855] 2) a common pattern of backbone linkages; and
[0856] 3) a common pattern of backbone chiral centers, which composition is a substantially pure preparation of a single oligonucleotide in that a predetermined level of the oligonucleotides in the composition have the common base sequence and length, the common pattern of backbone linkages, and the common pattern of backbone chiral centers;

[0857] wherein the lipids are optionally and independently conjugated to one or more oligonucleotides of the plurality.

[0858] In some embodiments, a common base sequence and length may be referred to as a common base sequence. In some embodiments, oligonucleotides having a common base sequence may have the same pattern of nucleoside modifications, e.g., sugar modifications, base modifications, etc. In some embodiments, a pattern of nucleoside modifications may be represented by a combination of locations and modifications.

[0859] As understood by a person having ordinary skill in the art, a stereorandom or racemic preparation of oligonucleotides is prepared by non-stereoselective and/or low-stereoselective coupling of nucleotide monomers, typically without using any chiral auxiliaries, chiral modification reagents, and/or chiral catalysts. In some embodiments, in a substantially racemic (or chirally uncontrolled) preparation of oligonucleotides, all or most coupling steps are not chirally controlled in that the coupling steps are not specifically conducted to provide enhanced stereoselectivity. An example substantially racemic preparation of oligonucleotides is the preparation of phosphorothioate oligonucleotides through sulfurizing phosphite triesters from commonly used phosphoramidite oligonucleotide synthesis with either tteraethylthiuram disulfide or (TETD) or 3H-1, 2-bensodithiol-3-one 1, 1-dioxide (BDTD), a well-known process in the art. In some embodiments, substantially racemic preparation of oligonucleotides provides substantially racemic oligonucleotide compositions (or chirally uncontrolled oligonucleotide compositions). In some embodiments, at least one coupling of a nucleotide monomer has a diastereoselectivity lower than about 60:40, 70:30, 80:20, 85:15, 90:10, 91:9, 92:8, 97:3, 98:2, or 99:1. In some embodiments, at least two couplings of a nucleotide monomer have a diastereoselectivity lower than about 60:40, 70:30, 80:20, 85:15, 90:10, 91:9, 92:8, 97:3, 98:2, or 99:1. In some embodiments, at least three couplings of a nucleotide monomer have a diastereoselectivity lower than about 60:40, 70:30, 80:20, 85:15, 90:10, 91:9, 92:8, 97:3, 98:2, or 99:1. In some embodiments, at least four couplings of a nucleotide monomer have a diastereoselectivity lower than about 60:40, 70:30, 80:20, 85:15, 90:10, 91:9, 92:8, 97:3, 98:2, or 99:1. In some embodiments, at least five couplings of a nucleotide monomer have a diastereoselectivity lower than about 60:40, 70:30, 80:20, 85:15, 90:10, 91:9, 92:8, 97:3, 98:2, or 99:1. In some embodiments, each coupling of a nucleotide monomer independently has a diastereoselectivity lower than about 60:40, 70:30, 80:20, 85:15, 90:10, 91:9, 92:8, 97:3, 98:2, or 99:1. In some embodiments, in a stereorandom or racemic preparations, at least one internucleotidic linkage has a diastereoselectivity lower than about 60:40, 70:30, 80:20, 85:15, 90:10, 91:9, 92:8, 97:3, 98:2, or 99:1. In some embodiments, at least two internucleotidic linkages have a diastereoselectivity lower than about 60:40, 70:30, 80:20, 85:15, 90:10, 91:9, 92:8, 97:3, 98:2, or 99:1. In some embodiments, at least three internucleotidic linkages have a diastereoselectivity lower than about 60:40, 70:30, 80:20, 85:15, 90:10, 91:9, 92:8, 97:3, 98:2, or 99:1. In some embodiments, at least four internucleotidic linkages have a diastereoselectivity lower than about 60:40, 70:30, 80:20, 85:15, 90:10, 91:9, 92:8, 97:3, 98:2, or 99:1. In some embodiments, at least five internucleotidic linkages have a diastereoselectivity lower than about 60:40, 70:30, 80:20, 85:15, 90:10, 91:9, 92:8, 97:3, 98:2, or 99:1. In some embodiments, each internucleotidic linkage independently has a diastereoselectivity lower than about 60:40, 70:30, 80:20, 85:15, 90:10, 91:9, 92:8, 97:3, 98:2, or 99:1. In some embodiments, a diastereoselectivity is lower than about 60:40. In some embodiments, a diastereoselectivity is lower than about 70:30. In some embodiments, a diastereoselectivity is lower than about 80:20. In some embodiments, a diastereoselectivity is lower than about 90:10. In some embodiments, a diastereoselectivity is lower than about 91:9. In some embodiments, a diastereoselectivity is lower than about 92:8. In some embodiments, a diastereoselectivity is lower than about 93:7. In some embodiments, a diastereoselectivity is lower than about 94:6. In some embodiments, a diastereoselectivity is lower than about 95:5. In some embodiments, a diastereoselectivity is lower than about 96:4. In some embodiments, a diastereoselectivity is lower than about 97:3. In some embodiments, a diastereoselectivity is lower than about 98:2. In some embodiments, a diastereoselectivity is lower than about 99:1. In some embodiments, at least one coupling has a diastereoselectivity lower than about 90:10. In some embodiments, at least two couplings have a diastereoselectivity lower than about 90:10. In some embodiments, at least three couplings have a diastereoselectivity lower than about 90:10. In some embodiments, at least four couplings have a diastereoselectivity lower than about 90:10. In some embodiments, at least five couplings have a diastereoselectivity lower than about 90:10. In some embodiments, each coupling independently has a diastereoselectivity lower than about 90:10. In some embodiments, at least one internucleotidic linkage has a diastereoselectivity lower than about 90:10. In some embodiments, at least two internucleotidic linkages have a diastereoselectivity lower than about 90:10. In some embodiments, at least three internucleotidic linkages have a diastereoselectivity lower than about 90:10. In some embodiments, at least four internucleotidic linkages have a diastereoselectivity lower than about 90:10. In some embodiments, at least five internucleotidic linkages have a diastereoselectivity lower than about 90:10. In some embodiments, each internucleotidic linkage independently has a diastereoselectivity lower than about 90:10.

[0860] As understood by a person having ordinary skill in the art, in some embodiments, diastereoselectivity of a coupling or a linkage can be assessed through the diastereoselectivity of a dimer formation under the same or comparable conditions, wherein the dimer has the same 5′- and 3′-nucleosides and internucleotidic linkage. For example, diastereoselectivity of the underlined coupling or linkage in NNNNNNNG*SGNNNNNNN can be assessed from coupling two G moieties under the same or comparable conditions, e.g., monomers, chiral auxiliaries, solvents, activators, temperatures, etc.

[0861] In some embodiments, oligonucleotides having a common base sequence and length, a common pattern of backbone linkages, and a common pattern of backbone chiral centers have a common pattern of backbone phosphorus modifications and a common pattern of base modifications. In some embodiments, oligonucleotides having a common base sequence and length, a common pattern of backbone linkages, and a common pattern of backbone chiral centers have a common pattern of backbone phosphorus modifications and a common pattern of nucleoside modifications. In some embodiments, oligonucleotides having a common base sequence and length, a common pattern of backbone linkages, and a common pattern of backbone chiral centers have identical structures.

[0862] In some embodiments, oligonucleotides of an oligonucleotide type have a common pattern of backbone phosphorus modifications and a common pattern of sugar modifications. In some embodiments, oligonucleotides of an oligonucleotide type have a common pattern of backbone phosphorus modifications and a common pattern of base modifications. In some embodiments, oligonucleotides of an oligonucleotide type have a common pattern of backbone phosphorus modifications and a common pattern of nucleoside modifications. In some embodiments, oligonucleotides of an oligonucleotide type are identical.

[0863] In some embodiments, a chirally controlled oligonucleotide composition is a substantially pure preparation of an oligonucleotide type in that oligonucleotides in the composition that are not of the oligonucleotide type are impurities form the preparation process of said oligonucleotide type, in some case, after certain purification procedures.

[0864] In some embodiments, at least about 20% of the oligonucleotides in the composition have a common base sequence and length, a common pattern of backbone linkages, and a common pattern of backbone chiral centers. In some embodiments, at least about 25% of the oligonucleotides in the composition have a common base sequence and length, a common pattern of backbone linkages, and a common pattern of backbone chiral centers. In some embodiments, at least about 30% of the oligonucleotides in the composition have a common base sequence and length, a common pattern of backbone linkages, and a common pattern of backbone chiral centers. In some embodiments, at least about 35% of the oligonucleotides in the composition have a common base sequence and length, a common pattern of backbone linkages, and a common pattern of backbone chiral centers. In some embodiments, at least about 40% of the oligonucleotides in the composition have a common base sequence and length, a common pattern of backbone linkages, and a common pattern of backbone chiral centers. In some embodiments, at least about 45% of the oligonucleotides in the composition have a common base sequence and length, a common pattern of backbone linkages, and a common pattern of backbone chiral centers. In some embodiments, at least about 50% of the oligonucleotides in the composition have a common base sequence and length, a common pattern of backbone linkages, and a common pattern of backbone chiral centers. In some embodiments, at least about 55% of the oligonucleotides in the composition have a common base sequence and length, a common pattern of backbone linkages, and a common pattern of backbone chiral centers. In some embodiments, at least about 60% of the oligonucleotides in the composition have a common base sequence and length, a common pattern of backbone linkages, and a common pattern of backbone chiral centers. In some embodiments, at least about 65% of the oligonucleotides in the composition have a common base sequence and length, a common pattern of backbone linkages, and a common pattern of backbone chiral centers. In some embodiments, at least about 70% of the oligonucleotides in the composition have a common base sequence and length, a common pattern of backbone linkages, and a common pattern of backbone chiral centers. In some embodiments, at least about 75% of the oligonucleotides in the composition have a common base sequence and length, a common pattern of backbone linkages, and a common pattern of backbone chiral centers. In some embodiments, at least about 80% of the oligonucleotides in the composition have a common base sequence and length, a common pattern of backbone linkages, and a common pattern of backbone chiral centers. In some embodiments, at least about 85% of the oligonucleotides in the composition have a common base sequence and length, a common pattern of backbone linkages, and a common pattern of backbone chiral centers. In some embodiments, at least about 90% of the oligonucleotides in the composition have a common base sequence and length, a common pattern of backbone linkages, and a common pattern of backbone chiral centers. In some embodiments, at least about 92% of the oligonucleotides in the composition have a common base sequence and length, a common pattern of backbone linkages, and a common pattern of backbone chiral centers. In some embodiments, at least about 94% of the oligonucleotides in the composition have a common base sequence and length, a common pattern of backbone linkages, and a common pattern of backbone chiral centers. In some embodiments, at least about 95% of the oligonucleotides in the composition have a common base sequence and length, a common pattern of backbone linkages, and a common pattern of backbone chiral centers. In some embodiments, at least about 91%, 92%, 93%, 94%, 95%, 96%, 97%, 98%, or 99% of the oligonucleotides in the composition have a common base sequence and length, a common pattern of backbone linkages, and a common pattern of backbone chiral centers. In some embodiments, greater than about 99% of the oligonucleotides in the composition have a common base sequence and length, a common pattern of backbone linkages, and a common pattern of backbone chiral centers. In some embodiments, purity of a chirally controlled oligonucleotide composition of an oligonucleotide can be expressed as the percentage of oligonucleotides in the composition that have a common base sequence and length, a common pattern of backbone linkages, and a common pattern of backbone chiral centers.

[0865] In some embodiments, oligonucleotides having a common base sequence and length, a common pattern of backbone linkages, and a common pattern of backbone chiral centers have a common pattern of backbone phosphorus modifications. In some embodiments, oligonucleotides having a common base sequence and length, a common pattern of backbone linkages, and a common pattern of backbone chiral centers have a common pattern of backbone phosphorus modifications and a common pattern of nucleoside modifications. In some embodiments, oligonucleotides having a common base sequence and length, a common pattern of backbone linkages, and a common pattern of backbone chiral centers have a common pattern of backbone phosphorus modifications and a common pattern of sugar modifications. In some embodiments, oligonucleotides having a common base sequence and length, a common pattern of backbone linkages, and a common pattern of backbone chiral centers have a common pattern of backbone phosphorus modifications and a common pattern of base modifications. In some embodiments, oligonucleotides having a common base sequence and length, a common pattern of backbone linkages, and a common pattern of backbone chiral centers have a common pattern of backbone phosphorus modifications and a common pattern of nucleoside modifications. In some embodiments, oligonucleotides having a common base sequence and length, a common pattern of backbone linkages, and a common pattern of backbone chiral centers are identical.

[0866] In some embodiments, oligonucleotides in provided compositions have a common pattern of backbone phosphorus modifications. In some embodiments, a common base sequence is a base sequence of an oligonucleotide type.

[0867] As noted above and understood in the art, in some embodiments, base sequence of an oligonucleotide may refer to the identity and/or modification status of nucleoside residues (e.g., of sugar and/or base components, relative to standard naturally occurring nucleotides such as adenine, cytosine, guanosine, thymine, and uracil) in the oligonucleotide and/or to the hybridization character (i.e., the ability to hybridize with particular complementary residues) of such residues.

[0868] In some embodiments, a particular oligonucleotide type may be defined by
[0869] 1A) base identity;
[0870] 1B) pattern of base modification;
[0871] 1C) pattern of sugar modification;
[0872] 2) pattern of backbone linkages;
[0873] 3) pattern of backbone chiral centers; and
[0874] 4) pattern of backbone phosphorus modifications.
   Thus, in some embodiments, oligonucleotides of a particular type may share identical bases but differ in their pattern of base modifications and/or sugar modifications. In some embodiments, oligonucleotides of a particular type may share identical bases and pattern of base modifications (including, e.g., absence of base modification), but differ in pattern of sugar modifications.

[0875] In some embodiments, oligonucleotides of a particular type are identical in that they have the same base sequence (including length), the same pattern of chemical modifications to sugar and base moieties, the same pattern of backbone linkages (e.g., pattern of natural phosphate linkages, phosphorothioate linkages, phosphorothioate triester linkages, and combinations thereof), the same pattern of backbone chiral centers (e.g., pattern of stereochemistry (Rp/Sp) of chiral internucleotidic linkages), and the same pattern of backbone phosphorus modifications (e.g., pattern of modifications on the internucleotidic phosphorus atom, such as —S—, and -L-R¹ of formula I).

[0876] In some embodiments, purity of a chirally controlled oligonucleotide composition of an oligonucleotide type is expressed as the percentage of oligonucleotides in the composition that are of the oligonucleotide type. In some embodiments, at least about 10% of the oligonucleotides in a chirally controlled oligonucleotide composition are of the same oligonucleotide type. In some embodiments, at least about 20% of the oligonucleotides in a chirally controlled oligonucleotide composition are of the same oligonucleotide type. In some embodiments, at least about 30% of the oligonucleotides in a chirally controlled oligonucleotide composition are of the same oligonucleotide type. In some embodiments, at least about 40% of the oligonucleotides in a chirally controlled oligonucleotide composition are of the same oligonucleotide type. In some embodiments, at least about 50% of the oligonucleotides in a chirally controlled oligonucleotide composition are of the same oligonucleotide type. In some embodiments, at least about 60% of the oligonucleotides in a chirally controlled oligonucleotide composition are of the same oligonucleotide type. In some embodiments, at least about 70% of the oligonucleotides in a chirally controlled oligonucleotide composition are of the same oligonucleotide type. In some embodiments, at least about 80% of the oligonucleotides in a chirally controlled oligonucleotide composition are of the same oligonucleotide type. In some embodiments, at least about 90% of the oligonucleotides in a chirally controlled oligonucleotide composition are of the same oligonucleotide type. In some embodiments, at least about 92% of the oligonucleotides in a chirally controlled oligonucleotide composition are of the same oligonucleotide type. In some embodiments, at least about 94% of the oligonucleotides in a chirally controlled oligonucleotide composition are of the same oligonucleotide type. In some embodiments, at least about 95% of the oligonucleotides in a chirally controlled oligonucleotide composition are of the same oligonucleotide type. In some embodiments, at least about 96% of the oligonucleotides in a chirally controlled oligonucleotide composition are of the same oligonucleotide type. In some embodiments, at least about 97% of the oligonucleotides in a chirally controlled oligonucleotide composition are of the same oligonucleotide type. In some embodiments, at least about 98% of the oligonucleotides in a chirally controlled oligonucleotide composition are of the same oligonucleotide type. In some embodiments, at least about 99% of the oligonucleotides in a chirally controlled oligonucleotide composition are of the same oligonucleotide type.

[0877] In some embodiments, purity of a chirally controlled oligonucleotide composition can be controlled by stereoselectivity of each coupling step in its preparation process. In some embodiments, a coupling step has a stereoselectivity (e.g., diastereoselectivity) of 60% (60% of the new internucleotidic linkage formed from the coupling step has the intended stereochemistry). After such a coupling step, the new internucleotidic linkage formed may be referred to have a 60% purity. In some embodiments, each coupling step has a stereoselectivity of at least 60%. In some embodiments, each coupling step has a stereoselectivity of at least 70%. In some embodiments, each coupling step has a stereoselectivity of at least 80%. In some embodiments, each coupling step has a stereoselectivity of at least 85%. In some embodiments, each coupling step has a stereoselectivity of at least 90%. In some embodiments, each coupling step has a stereoselectivity of at least 91%. In some embodiments, each coupling step has a stereoselectivity of at least 92%. In some embodiments, each coupling step has a stereoselectivity of at least 93%. In some embodiments, each coupling step has a stereoselectivity of at least 94%. In some embodiments, each coupling step has a stereoselectivity of at least 95%. In some embodiments, each coupling step has a stereoselectivity of at least 96%. In some embodiments, each coupling step has a stereoselectivity of at least 97%. In some embodiments, each coupling step has a stereoselectivity of at least 98%. In some embodiments, each coupling step has a stereoselectivity of at least 99%. In some embodiments, each coupling step has a stereoselectivity of at least 99.5%. In some embodiments, each coupling step has a stereoselectivity of virtually 100%. In some embodiments, a coupling step has a stereoselectivity of virtually 100% in that all detectable product from the coupling step by an analytical method (e.g., NMR, HPLC, etc) has the intended stereoselectivity. In some embodiments, stereoselectivity of a chiral internucleotidic linkage in an oligonucleotide may be measured through a model reaction, e.g. formation of a dimer under essentially the same or comparable conditions wherein the dimer has the same internucleotidic linkage as the chiral internucleotidic linkage, the 5′-nucleoside of the dimer is the same as the nucleoside to the 5′-end of the chiral internucleotidic linkage, and the 3′-nucleoside of the dimer is the same as the nucleoside to the 3′-end of the chiral internucleotidic linkage (e.g., for fU*SfU*SfC*SfU, through the dimer of fU*SfC). As appreciated by a person having ordinary skill in the art, percentage of oligonucleotides of a particular type having n internucleotidic linkages in a preparation may be calculated as SE¹*SE²*SE³* . . . SEⁿ, wherein SE¹, SE², SE³, . . . , SEⁿ is independently the stereoselectivity of the 1^{st}, 2^{nd}, 3^{rd}, . . . , and n^{th} chiral internucleotidic linkage.

[0878] In some embodiments, in provided compositions, at least 0.5%, 1%, 2%, 3%, 4%, 5%, 6%, 7%, 8%, 9%, 10%, 20%, 30%, 40%, 50%, 60%, 70%, 75%, 80%, 81%, 82%, 83%, 84%, 85%, 86%, 87%, 88%, 89%, 90%, 91%, 92%, 93%, 94%, 95%, 96%, 97%, 97% or 99% of oligonucleotides that have the base sequence of a particular oligonucleotide type (defined by 1) base sequence; 2) pattern of backbone linkages; 3) pattern of backbone chiral centers; and 4) pattern of backbone phosphorus modifications) are oligonucleotides of the particular oligonucleotide type. In some embodiments, at least 0.5%, 1%, 2%, 3%, 4%, 5%, 6%, 7%, 8%, 9%, 10%, 20%, 30%, 40%, 50%, 60%, 70%, 75%, 80%, 81%, 82%, 83%, 84%, 85%, 86%, 87%, 88%, 89%, 90%, 91%, 92%, 93%, 94%, 95%, 96%, 97%, 97% or 99% of oligonucleotides that have the base sequence, the pattern of backbone linkages, and the pattern of backbone phosphorus modifications of a particular oligonucleotide type are oligonucleotides of the particular oligonucleotide type. In some embodiments, the percentage is at least 0.5%. In some embodiments, the percentage is at least 1%. In some embodiments, the percentage is at least 2%. In some embodiments, the percentage is at least 3%. In some embodiments, the percentage is at least 4%. In some embodiments, the percentage is at least 5%. In some embodiments, the percentage is at least 6%. In some embodiments, the percentage is at least 7%. In some embodiments, the percentage is at least 8%. In some embodiments, the percentage is at least 9%. In some embodiments, the percentage is at least 10%. In some embodiments, the percentage is at least 20%. In some embodiments, the percentage is at least 30%. In some embodiments, the percentage is at least 40%. In some embodiments, the percentage is at least 50%. In some embodiments, the percentage is at least 60%. In some embodiments, the percentage is at least 70%. In some embodiments, the percentage is at least 75%. In some embodiments, the percentage is at least 80%. In some embodiments, the percentage is at least 81%. In some embodiments, the percentage is at least 82%. In some embodiments, the percentage is at least 83%. In some embodiments, the percentage is at least 84%. In some embodiments, the percentage is at least 85%. In some embodiments, the percentage is at least 86%. In some embodiments, the percentage is at least 87%. In some embodiments, the percentage is at least 88%. In some embodiments, the percentage is at least 89%. In some embodiments, the percentage is at least 90%. In some embodiments, the percentage is at least 91%. In some embodiments, the percentage is at least 92%. In some embodiments, the percentage is at least 93%. In some embodiments, the percentage is at least 94%. In some embodiments, the percentage is at least 95%. In some embodiments, the percentage is at least 96%. In some embodiments, the percentage is at least 97%. In some embodiments, the percentage is at least 98%. In some embodiments, the percentage is at least 99%.

[0879] As described herein, in some embodiments, provided oligonucleotides comprises one or more wing regions and a core region. In some embodiments, a wing region comprises a structural feature that is not in a core region. In some embodiments, a wing and core can be defined by any structural elements, e.g., base modifications (e.g., methylated/non-methylated, methylation at position 1/methylation at position 2, etc.), sugar modifications (e.g., modified/non-modified, 2′-modification/another type of modification, one type of 2′-modification/another type of 2′-modification, etc.), backbone linkage types (e.g., phosphate/phosphorothioate, phosphorothioate/substituted phosphorothioate, etc.), backbone chiral center stereochemistry (e.g., all Sp/all Rp, (SpRp) repeats/all Rp, etc.), backbone phosphorus modification types (e.g., s1/s2, s1/s3, etc.), etc.

[0880] In some embodiments, a wing and core is defined by nucleoside modifications, wherein a wing comprises a nucleoside modification that the core region does not have. In some embodiments, a wing and core is defined by sugar modifications, wherein a wing comprises a sugar modification that the core region does not have. In some embodiments, a sugar modification is a 2′-modification. In some embodiments, a sugar modification is 2′-OR¹. In some embodiments, a sugar modification is 2′-MOE. In some embodiments, a sugar modification is 2′-OMe. Additionally example sugar modifications are described in the present disclosure. In some embodiments, a wing and core is defined by internucleotidic linkages, wherein a wing comprises a internucleotidic linkage type (e.g., natural phosphate linkage, a type of modified internucleotidic linkage, etc.) that the core region does not have. In some embodiments, a wing and core is defined by internucleotidic linkages, wherein a wing has a pattern of backbone linkage that is different from that of the core.

[0881] In some embodiments, oligonucleotides in provided compositions have a wing-core or core-wing structure (hemimer). In some embodiments, oligonucleotides in provided compositions have a wing-core structure of nucleoside modifications. In some embodiments, oligonucleotides in provided compositions have a core-wing structure (another type of hemimer). In some embodiments, oligonucleotides in provided compositions have a core-wing structure of nucleoside modifications. In some embodiments, oligonucleotides in provided compositions have a wing-core-wing structure (gapmer). In some embodiments, oligonucleotides in provided compositions have a wing-core-wing structure of nucleoside modifications. In some embodiments, a wing and core is defined by modifications of the sugar moieties. In some embodiments, a wing and core is defined by modifications of the base moieties. In some embodiments, each sugar moiety in the wing region has the same 2′-modification which is not found in the core region. In some embodiments, each sugar moiety in the wing region has the same 2′-modification which is different than any sugar modifications in the core region. In some embodiments, a core region has no sugar modification. In some embodiments, each sugar moiety in the wing region has the same 2′-modification, and the core region has no 2′-modifications. In some embodiments, when two or more wings are present, each wing is defined by its own modifications. In some embodiments, each wing has its own characteristic sugar modification. In some embodiments, each wing has the same characteristic sugar modification differentiating it from a core. In some embodiments, each wing sugar moiety has the same modification. In some embodiments, each wing sugar moiety has the same 2′-modification. In some embodiments, each sugar moiety in a wing region has the same 2′-modification, yet the common 2′-modification in a first wing region can either be the same as or different from the common 2′-modification in a second wing region. In some embodiments, each sugar moiety in a wing region has the same 2′-modification, and the common 2′-modification in a first wing region is the same as the common 2′-modification in a second wing region. In some embodiments, each sugar moiety in a wing region has the same 2′-modification, and the common 2′-modification in a first wing region is different from the common 2′-modification in a second wing region.

[0882] In some embodiments, provided chirally controlled (and/or stereochemically pure) preparations are antisense oligonucleotides (e.g., chiromersen). In some embodiments, provided chirally controlled (and/or stereochemically pure) preparations are siRNA oligonucleotides. In some embodiments, a provided chirally controlled oligonucleotide composition is of oligonucleotides that can be antisense oligonucleotide, antagomir, microRNA, pre-microRNs, antimir, supermir, ribozyme, Ul adaptor, RNA activator, RNAi agent, decoy oligonucleotide, triplex forming oligonucleotide, aptamer or adjuvant. In some embodiments, a chirally controlled oligonucleotide composition is of antisense oligonucleotides. In some embodiments, a chirally controlled oligonucleotide composition is of antagomir oligonucleotides. In some embodiments, a chirally controlled oligonucleotide composition is of microRNA oligonucleotides. In some embodiments, a chirally controlled oligonucleotide composition is of pre-microRNA oligonucleotides. In some embodiments, a chirally controlled oligonucleotide composition is of antimir oligonucleotides. In some embodiments, a chirally controlled oligonucleotide composition is of supermir oligonucleotides. In some embodiments, a chirally controlled oligonucleotide composition is of ribozyme oligonucleotides. In some embodiments, a chirally controlled oligonucleotide composition is of Ul adaptor oligonucleotides. In some embodiments, a chirally controlled oligonucleotide composition is of RNA activator oligonucleotides. In some embodiments, a chirally controlled oligonucleotide composition is of RNAi agent oligonucleotides. In some embodiments, a chirally controlled oligonucleotide composition is of decoy oligonucleotides. In some embodiments, a chirally controlled oligonucleotide composition is of triplex forming oligonucleotides. In some embodiments, a chirally controlled oligonucleotide composition is of aptamer oligonucleotides. In some embodiments, a chirally controlled oligonucleotide composition is of adjuvant oligonucleotides.

[0883] In some embodiments, provided chirally controlled (and/or stereochemically pure) preparations are of oligonucleotides that include one or more modified backbone linkages, bases, and/or sugars.

[0884] In some embodiments, a provided oligonucleotide comprises one or more chiral, modified phosphate linkages. In some embodiments, a provided oligonucleotide comprises two or more chiral, modified phosphate linkages. In some embodiments, a provided oligonucleotide comprises three or more chiral, modified phosphate linkages. In some embodiments, a provided oligonucleotide comprises four or more chiral, modified phosphate linkages. In some embodiments, a provided oligonucleotide comprises five or more chiral, modified phosphate linkages. In some embodiments, a provided oligonucleotide comprises 1, 2, 3, 4, 5, 6, 7, 8, 9, 10, 11, 12, 13, 14, 15, 16, 17, 18, 19, 20, 21, 22, 23, 24, or 25 chiral, modified phosphate linkages. In some embodiments, a provided oligonucleotide type comprises 5 or more chiral, modified phosphate linkages. In some embodiments, a provided oligonucleotide type comprises 6 or more chiral, modified phosphate linkages. In some embodiments, a provided oligonucleotide type comprises 7 or more chiral, modified phosphate linkages. In some embodiments, a provided oligonucleotide type comprises 8 or more chiral, modified phosphate linkages. In some embodiments, a provided oligonucleotide type comprises 9 or more chiral, modified phosphate linkages. In some embodiments, a provided oligonucleotide type comprises 10 or more chiral, modified phosphate linkages. In some embodiments, a provided oligonucleotide type comprises 11 or more chiral, modified phosphate linkages. In some embodiments, a provided oligonucleotide type comprises 12 or more chiral, modified phosphate linkages. In some embodiments, a provided oligonucleotide type comprises 13 or more chiral, modified phosphate linkages. In some embodiments, a provided oligonucleotide type comprises 14 or more chiral, modified phosphate linkages. In some embodiments, a provided oligonucleotide type comprises 15 or more chiral, modified phosphate linkages. In some embodiments, a provided oligonucleotide type comprises 16 or more chiral, modified phosphate linkages. In some embodiments, a provided oligonucleotide type comprises 17 or more chiral, modified phosphate linkages. In some embodiments, a provided oligonucleotide type comprises 18 or more chiral, modified phosphate linkages. In some embodiments, a provided oligonucleotide type comprises 19 or more chiral, modified phosphate linkages. In some embodiments, a provided oligonucleotide type comprises 20 or more chiral, modified phosphate linkages. In some embodiments, a provided oligonucleotide type comprises 21 or more chiral, modified phosphate linkages. In some embodiments, a provided oligonucleotide type comprises 22 or more chiral, modified phosphate linkages. In some embodiments, a provided oligonucleotide type comprises 23 or more chiral, modified phosphate linkages. In some embodiments, a provided oligonucleotide type comprises 24 or more chiral, modified phosphate linkages. In some embodiments, a provided oligonucleotide type comprises 25 or more chiral, modified phosphate linkages.

[0885] In some embodiments, a provided oligonucleotide comprises at least 5%, 10%, 15%, 20%, 25%, 30%, 35%, 40%, 45%, 50%, 55%, 60%, 65%, 70%, 75%, 80%, 85%, 90%, 95%, or 100% chiral, modified phosphate linkages. Example such chiral, modified phosphate linkages are described above and herein. In some embodiments, a provided oligonucleotide comprises at least 5%, 10%, 15%, 20%, 25%, 30%, 35%, 40%, 45%, 50%, 55%, 60%, 65%, 70%, 75%, 80%, 85%, 90%, 95%, or 100% chiral, modified phosphate linkages in the Sp configuration.

[0886] In some embodiments, provided chirally controlled (and/or stereochemically pure) preparations are of a stereochemical purity of greater than about 80%. In some embodiments, provided chirally controlled (and/or stereochemically pure) preparations are of a stereochemical purity of greater than about 85%. In some embodiments, provided chirally controlled (and/or stereochemically pure) preparations are of a stereochemical purity of greater than about 90%. In some embodiments, provided chirally controlled (and/or stereochemically pure) preparations are of a stereochemical purity of greater than about 91%. In some embodiments, provided chirally controlled (and/or stereochemically pure) preparations are of a stereochemical purity of greater than about 92%. In some embodiments, provided chirally controlled (and/or stereochemically pure) preparations are of a stereochemical purity of greater than about 93%. In some embodiments, provided chirally controlled (and/or stereochemically pure) preparations are of a stereochemical purity of greater than about 94%. In some embodiments, provided chirally controlled (and/or stereochemically pure) preparations are of a stereochemical purity of greater than about 95%. In some embodiments, provided chirally controlled (and/or stereochemically pure) preparations are of a stereochemical purity of greater than about 96%. In some embodiments, provided chirally controlled (and/or stereochemically pure) preparations are of a stereochemical purity of greater than about 97%. In some embodiments, provided chirally controlled (and/or stereochemically pure) preparations are of a stereochemical purity of greater than about 98%. In some embodiments, provided chirally controlled (and/or stereochemically pure) preparations are of a stereochemical purity of greater than about 99%. In some embodiments, such a provided purity can be of one or more chiral internucleotidic linkage is a composition is partially chirally controlled.

[0887] In some embodiments, a chiral, modified phosphate linkage is a chiral phosphorothioate linkage, i.e., phosphorothioate internucleotidic linkage. In some embodiments, a provided oligonucleotide comprises at least 5%, 10%, 15%, 20%, 25%, 30%, 35%, 40%, 45%, 50%, 55%, 60%, 65%, 70%, 75%, 80%, 85%, 90%, 95%, or 100% chiral phosphorothioate internucleotidic linkages. In some embodiments, all chiral, modified phosphate linkages are chiral phosphorothioate internucleotidic linkages. In some embodiments, at least about 10, 20, 30, 40, 50, 60, 70, 80, or 90% chiral phosphorothioate internucleotidic linkages of a provided oligonucleotide are of the Sp conformation. In some embodiments, at least about 10% chiral phosphorothioate internucleotidic linkages of a provided oligonucleotide are of the Sp conformation. In some embodiments, at least about 20% chiral phosphorothioate internucleotidic linkages of a provided oligonucleotide are of the Sp conformation. In some embodiments, at least about 30% chiral phosphorothioate internucleotidic linkages of a provided oligonucleotide are of the Sp conformation. In some embodiments, at least about 40% chiral phosphorothioate internucleotidic linkages of a provided oligonucleotide are of the Sp conformation. In some embodiments, at least about 50% chiral phosphorothioate internucleotidic linkages of a provided oligonucleotide are of the Sp conformation. In some embodiments, at least about 60% chiral phosphorothioate internucleotidic linkages of a provided oligonucleotide are of the Sp conformation. In some embodiments, at least about 70% chiral phosphorothioate internucleotidic linkages of a provided oligonucleotide are of the Sp conformation. In some embodiments, at least about 80% chiral phosphorothioate internucleotidic linkages of a provided oligonucleotide are of the Sp conformation. In some embodiments, at least about 90% chiral phosphorothioate internucleotidic linkages of a provided oligonucleotide are of the Sp conformation. In some embodiments, at least about 95% chiral phosphorothioate internucleotidic linkages of a provided oligonucleotide are of the Sp conformation.

[0888] In some embodiments, at least about 10, 20, 30, 40, 50, 60, 70, 80, or 90% chiral phosphorothioate internucleotidic linkages of a provided oligonucleotide are of the Rp conformation. In some embodiments, at least about 10% chiral phosphorothioate internucleotidic linkages of a provided oligonucleotide are of the Rp conformation. In some embodiments, at least about 20% chiral phosphorothioate internucleotidic linkages of a provided oligonucleotide are of the Rp conformation. In some embodiments, at least about 30% chiral phosphorothioate internucleotidic linkages of a provided oligonucleotide are of the Rp conformation. In some embodiments, at least about 40% chiral phosphorothioate internucleotidic linkages of a provided oligonucleotide are of the Rp conformation. In some embodiments, at least about 50% chiral phosphorothioate internucleotidic linkages of a provided oligonucleotide are of the Rp conformation. In some embodiments, at least about 60% chiral phosphorothioate internucleotidic linkages of a provided oligonucleotide are of the Rp conformation. In some embodiments, at least about 70% chiral phosphorothioate internucleotidic linkages of a provided oligonucleotide are of the Rp conformation. In some embodiments, at least about 80% chiral phosphorothioate internucleotidic linkages of a provided oligonucleotide are of the Rp conformation. In some embodiments, at least about 90% chiral phosphorothioate internucleotidic linkages of a provided oligonucleotide are of the Rp conformation. In some embodiments, at least about 95% chiral phosphorothioate internucleotidic linkages of a provided oligonucleotide are of the Rp conformation.

[0889] In some embodiments, less than about 10, 20, 30, 40, 50, 60, 70, 80, or 90% chiral phosphorothioate internucleotidic linkages of a provided oligonucleotide are of the Rp conformation. In some embodiments, less than about 10% chiral phosphorothioate internucleotidic linkages of a provided oligonucleotide are of the Rp conformation. In some embodiments, less than about 20% chiral phosphorothioate internucleotidic linkages of a provided oligonucleotide are of the Rp conformation. In some embodiments, less than about 30% chiral phosphorothioate internucleotidic linkages of a provided oligonucleotide are of the Rp conformation. In some embodiments, less than about 40% chiral phosphorothioate internucleotidic linkages of a provided oligonucleotide are of the Rp conformation. In some embodiments, less than about 50% chiral phosphorothioate internucleotidic linkages of a provided oligonucleotide are of the Rp conformation. In some embodiments, less than about 60% chiral phosphorothioate internucleotidic linkages of a provided oligonucleotide are of the Rp conformation. In some embodiments, less than about 70% chiral phosphorothioate internucleotidic linkages of a provided oligonucleotide are of the Rp conformation. In some embodiments, less than about 80% chiral phosphorothioate internucleotidic linkages of a provided oligonucleotide are of the Rp conformation. In some embodiments, less than about 90% chiral phosphorothioate internucleotidic linkages of a provided oligonucleotide are of the Rp conformation. In some embodiments, less than about 95% chiral phosphorothioate internucleotidic linkages of a provided oligonucleotide are of the Rp conformation. In some embodiments, a provided oligonucleotide has only one Rp chiral phosphorothioate internucleotidic linkages. In some embodiments, a provided oligonucleotide has only one Rp chiral phosphorothioate internucleotidic linkages, wherein all internucleotide linkages are chiral phosphorothioate internucleotidic linkages.

[0890] In some embodiments, a chiral phosphorothioate internucleotidic linkage is a chiral phosphorothioate diester linkage. In some embodiments, each chiral phosphorothioate internucleotidic linkage is independently a chiral phosphorothioate diester linkage. In some embodiments, each internucleotidic linkage is independently a chiral phosphorothioate diester linkage. In some embodiments, each internucleotidic linkage is independently a chiral phosphorothioate diester linkage, and only one is Rp.

[0891] In some embodiments, provided chirally controlled (and/or stereochemically pure) preparations are of oligonucleotides that contain one or more modified bases. In some embodiments, provided chirally controlled (and/or stereochemically pure) preparations are of oligonucleotides that contain no modified bases. Example such modified bases are described above and herein.

[0892] In some embodiments, an oligonucleotide comprises at least one internucleotidic linkage which is chirally controlled (e.g., a phosphorothioate in Sp or Rp configuration) and at least one internucleotidic linkage which is not chiral (e.g., a phosphodiester or phosphorodithioate). In some embodiments, an oligonucleotide comprises at least one internucleotidic linkage which is chirally controlled phosphorothioate in Sp configuration and at least one internucleotidic linkage which is not chiral (e.g., a phosphodiester or phosphorodithioate).

[0893] In some embodiments, oligonucleotides of provided compositions comprise at least 2, 3, 4, 5, 6, 7, 8, 9 or 10 natural phosphate linkages. In some embodiments, oligonucleotides of provided compositions comprise at least one natural phosphate linkage. In some embodiments, oligonucleotides of provided compositions comprise at least two natural phosphate linkages. In some embodiments, oligonucleotides of provided compositions comprise at least three natural phosphate linkages. In some embodiments, oligonucleotides of provided compositions comprise at least four natural phosphate linkages. In some embodiments, oligonucleotides of provided compositions comprise at least five natural phosphate linkages. In some embodiments, oligonucleotides of provided compositions comprise at least six natural phosphate linkages. In some embodiments, oligonucleotides of provided compositions comprise at least seven natural phosphate linkages. In some embodiments, oligonucleotides of provided compositions comprise at least eight natural phosphate linkages. In some embodiments, oligonucleotides of provided compositions comprise at least nine natural phosphate linkages. In some embodiments, oligonucleotides of provided compositions comprise at least ten natural phosphate linkages.

[0894] In some embodiments, oligonucleotides of provided compositions comprise 2, 3, 4, 5, 6, 7, 8, 9 or 10 natural phosphate linkages. In some embodiments, oligonucleotides of provided compositions comprise one natural phosphate linkage. In some embodiments, oligonucleotides of provided compositions comprise two natural phosphate linkages. In some embodiments, oligonucleotides of provided compositions comprise three natural phosphate linkages. In some embodiments, oligonucleotides of provided compositions comprise four natural phosphate linkages. In some embodiments, oligonucleotides of provided compositions comprise five natural phosphate linkages. In some embodiments, oligonucleotides of provided compositions comprise six natural phosphate linkages. In some embodiments, oligonucleotides of provided compositions comprise seven natural phosphate linkages. In some embodiments, oligonucleotides of provided compositions comprise eight natural phosphate linkages. In some embodiments, oligonucleotides of provided compositions comprise nine natural phosphate linkages. In some embodiments, oligonucleotides of provided compositions comprise ten natural phosphate linkages.

[0895] In some embodiments, oligonucleotides of provided compositions comprise at least 2, 3, 4, 5, 6, 7, 8, 9 or 10 consecutive natural phosphate linkages. In some embodiments, oligonucleotides of provided compositions comprise at least two consecutive natural phosphate linkages. In some embodiments, oligonucleotides of provided compositions comprise at least three consecutive natural phosphate linkages. In some embodiments, oligonucleotides of provided compositions comprise at least four consecutive natural phosphate linkages. In some embodiments, oligonucleotides of provided compositions comprise at least five consecutive natural phosphate linkages. In some embodiments, oligonucleotides of provided compositions comprise at least six consecutive natural phosphate linkages. In some embodiments, oligonucleotides of provided compositions comprise at least seven consecutive natural phosphate linkages. In some embodiments, oligonucleotides of provided compositions comprise at least eight consecutive natural phosphate linkages. In some embodiments, oligonucleotides of provided compositions comprise at least nine consecutive natural phosphate linkages. In some embodiments, oligonucleotides of provided compositions comprise at least ten consecutive natural phosphate linkages.

[0896] In some embodiments, oligonucleotides of provided compositions comprise 2, 3, 4, 5, 6, 7, 8, 9 or 10 consecutive natural phosphate linkages. In some embodiments, oligonucleotides of provided compositions comprise two consecutive natural phosphate linkages. In some embodiments, oligonucleotides of provided compositions comprise three consecutive natural phosphate linkages. In some embodiments, oligonucleotides of provided compositions comprise four consecutive natural phosphate linkages. In some embodiments, oligonucleotides of provided compositions comprise five consecutive natural phosphate linkages. In some embodiments, oligonucleotides of provided compositions comprise six consecutive natural phosphate linkages. In some embodiments, oligonucleotides of provided compositions comprise seven consecutive natural phosphate linkages. In some embodiments, oligonucleotides of provided compositions comprise eight consecutive natural phosphate linkages. In some embodiments, oligonucleotides of provided compositions comprise nine consecutive natural phosphate linkages. In some embodiments, oligonucleotides of provided compositions comprise ten consecutive natural phosphate linkages.

[0897] In some embodiments, provided chirally controlled (and/or stereochemically pure) preparations are of oligonucleotides having a common base sequence of at least 8 bases. In some embodiments, provided chirally controlled (and/or stereochemically pure) preparations are of oligonucleotides having a common base sequence of at least 9 bases. In some embodiments, provided chirally controlled (and/or stereochemically pure) preparations are of oligonucleotides having a common base sequence of at least 10 bases. In some embodiments, provided chirally controlled (and/or stereochemically pure) preparations are of oligonucleotides having a common base sequence of at least 11 bases. In some embodiments, provided chirally controlled (and/or stereochemically pure) preparations are of oligonucleotides having a common base sequence of at least 12 bases. In some embodiments, provided chirally controlled (and/or stereochemically pure) preparations are of oligonucleotides having a common base sequence of at least 13 bases. In some embodiments, provided chirally controlled (and/or stereochemically pure) preparations are of oligonucleotides having a common base sequence of at least 14 bases. In some embodiments, provided chirally controlled (and/or stereochemically pure) preparations are of oligonucleotides having a common base sequence of at least 15 bases. In some embodiments, provided chirally controlled (and/or stereochemically pure) preparations are of oligonucleotides having a common base sequence of at least 16 bases. In some embodiments, provided chirally controlled (and/or stereochemically pure) preparations are of oligonucleotides having a common base sequence of at least 17 bases. In some embodiments, provided chirally controlled (and/or stereochemically pure) preparations are of oligonucleotides having a common base sequence of at least 18 bases. In some embodiments, provided chirally controlled (and/or stereochemically pure) preparations are of oligonucleotides having a common base sequence of at least 19 bases. In some embodiments, provided chirally controlled (and/or stereochemically pure) preparations are of oligonucleotides having a common base sequence of at least 20 bases. In some embodiments, provided chirally controlled (and/or stereochemically pure) preparations are of oligonucleotides having a common base sequence of at least 21 bases. In some embodiments, provided chirally controlled (and/or stereochemically pure) preparations are of oligonucleotides having a common base sequence of at least 22 bases. In some embodiments, provided chirally controlled (and/or stereochemically pure) preparations are of oligonucleotides having a common base sequence of at least 23 bases. In some embodiments, provided chirally controlled (and/or stereochemically pure) preparations are of oligonucleotides having a common base sequence of at least 24 bases. In some embodiments, provided chirally controlled (and/or stereochemically pure) preparations are of oligonucleotides having a common base sequence of at least 25 bases. In some embodiments, provided chirally controlled (and/or stereochemically pure) preparations are of oligonucleotides having a common base sequence of at least 30, 35, 40, 45, 50, 55, 60, 65, 70, or 75 bases.

[0898] In some embodiments, provided compositions comprise oligonucleotides containing one or more residues which are modified at the sugar moiety. In some embodiments, provided compositions comprise oligonucleotides containing one or more residues which are modified at the 2′ position of the sugar moiety (referred to herein as a “2′-modification”). Example such modifications are described above and herein and include, but are not limited to, 2′-OMe, 2′-MOE, 2′-LNA, 2′-F, FRNA, FANA, S-cEt, etc. In some embodiments, provided compositions comprise oligonucleotides containing one or more residues which are 2′-modified. For example, in some embodiments, provided oligonucleotides contain one or more residues which are 2′-O-methoxyethyl (2′-MOE)-modified residues. In some embodiments, provided compositions comprise oligonucleotides which do not contain any 2′-modifications. In some embodiments, provided compositions are oligonucleotides which do not contain any 2′-MOE residues. That is, in some embodiments, provided oligonucleotides are not MOE-modified. Additional example sugar modifications are described in the present disclosure.

[0899] In some embodiments, provided oligonucleotides are of a general motif of wing-core or core-wing (hemimer, also represented herein generally as X—Y or Y—X, respectively). In some embodiments, provided oligonucleotides are of a general motif of wing-core-wing (gapmer, also represented herein generally as X—Y—X). In some embodiments, each wing region independently contains one or more residues having a particular modification, which modification is absent from the core “Y” portion. In some embodiments, each wing region independently contains one or more residues having a particular nucleoside modification, which modification is absent from the core “Y” portion. In some embodiments, each wing region independently contains one or more residues having a particular base modification, which modification is absent from the core “Y” portion. In some embodiments, each wing region independently contains one or more residues having a particular sugar modification, which modification is absent from the core “Y” portion. Example sugar modifications are widely known in the art. In some embodiments, a sugar modification is a modification selected from those modifications described in U.S. Pat. No. 9,006,198, which sugar modifications are incorporated herein by references. Additional example sugar modifications are described in the present disclosure. In some embodiment, each wing contains one or more residues having a 2′ modification that is not present in the core portion. In some embodiments, a 2′-modification is 2′-OR¹, wherein R¹ is as defined and described in the present disclosure.

[0900] In some embodiments, provided oligonucleotides have a wing-core motif represented as X—Y, or a core-wing motif represented as Y—X, wherein the residues at the “X” portion are sugar modified residues of a particular type and the residues in the core “Y” portion are not sugar modified residues of the same particular type. In some embodiments, provided oligonucleotides have a wing-core-wing motif represented as X—Y—X, wherein the residues at each “X” portion are sugar modified residues of a particular type and the residues in the core “Y” portion are not sugar modified residues of the same particular type. In some embodiments, provided oligonucleotides have a wing-core motif represented as X—Y, or a core-wing motif represented as Y—X, wherein the residues at the “X” portion are 2′-modified residues of a particular type and the residues in the core “Y” portion are not 2′-modified residues of the same particular type. In some embodiments, provided oligonucleotides have a wing-core motif represented as X—Y, wherein the residues at the “X” portion are 2′-modified residues of a particular type and the residues in the core “Y” portion are not 2′-modified residues of the same particular type. In some embodiments, provided oligonucleotides have a core-wing motif represented as Y—X, wherein the residues at the “X” portion are 2′-modified residues of a particular type and the residues in the core “Y” portion are not 2′-modified residues of the same particular type. In some embodiments, provided oligonucleotides have a wing-core-wing motif represented as X—Y—X, wherein the residues at each “X” portion are 2′-modified residues of a particular type and the residues in the core “Y” portion are not 2′-modified residues of the same particular type. In some embodiments, provided oligonucleotides have a wing-core motif represented as X—Y, wherein the residues at the “X” portion are 2′-modified residues of a particular type and the residues in the core “Y” portion are 2′-deoxyribonucleoside. In some embodiments, provided oligonucleotides have a core-wing motif represented as Y—X, wherein the residues at the “X” portion are 2′-modified residues of a particular type and the residues in the core “Y” portion are 2′-deoxyribonucleoside. In some embodiments, provided oligonucleotides have a wing-core-wing motif represented as X—Y—X, wherein the residues at each “X” portion are 2′-modified residues of a particular type and the residues in the core “Y” portion are 2′-deoxyribonucleoside. In some embodiments, provided oligonucleotides have a wing-core-wing motif represented as X—Y—X, wherein the residues at each “X” portion are 2′-modified residues of a particular type and the residues in the core “Y” portion are 2′-deoxyribonucleoside. For instance, in some embodiments, provided oligonucleotides have a wing-core-wing motif represented as X—Y—X, wherein the residues at each “X” portion are 2′-MOE-modified residues and the residues in the core “Y” portion are not 2′-MOE-modified residues. In some embodiments, provided oligonucleotides have a wing-core-wing motif represented as X—Y—X, wherein the residues at each “X” portion are 2′-MOE-modified residues and the residues in the core “Y” portion are 2′-deoxyribonucleoside. One of skill in the relevant arts will recognize that all such 2′-modifications described above and herein are contemplated in the context of such X—Y, Y—X and/or X—Y—X motifs.

[0901] In some embodiments, a wing has a length of one or more bases. In some embodiments, a wing has a length of two or more bases. In some embodiments, a wing has a length of three or more bases. In some embodiments, a wing has a length of four or more bases. In some embodiments, a wing has a length of five or more bases. In some embodiments, a wing has a length of six or more bases. In some embodiments, a wing has a length of seven or more bases. In some embodiments, a wing has a length of eight or more bases. In some embodiments, a wing has a length of nine or more bases. In some embodiments, a wing has a length of ten or more bases. In some embodiments, a wing has a length of 11 or more bases. In some embodiments, a wing has a length of 12 or more bases. In some embodiments, a wing has a length of 13 or more bases. In some embodiments, a wing has a length of 14 or more bases. In some embodiments, a wing has a length of 15 or more bases. In some embodiments, a wing has a length of 16 or more bases. In some embodiments, a wing has a length of 17 or more bases. In some embodiments, a wing has a length of 18 or more bases. In some embodiments, a wing has a length of 19 or more bases. In some embodiments, a wing has a length of ten or more bases.

[0902] In some embodiments, a wing has a length of one base. In some embodiments, a wing has a length of two bases. In some embodiments, a wing has a length of three bases. In some embodiments, a wing has a length of four bases. In some embodiments, a wing has a length of five bases. In some embodiments, a wing has a length of six bases. In some embodiments, a wing has a length of seven bases. In some embodiments, a wing has a length of eight bases. In some embodiments, a wing has a length of nine bases. In some embodiments, a wing has a length of ten bases. In some embodiments, a wing has a length of 11 bases. In some embodiments, a wing has a length of 12 bases. In some embodiments, a wing has a length of 13 bases. In some embodiments, a wing has a length of 14 bases. In some embodiments, a wing has a length of 15 bases. In some embodiments, a wing has a length of 16 bases. In some embodiments, a wing has a length of 17 bases. In some embodiments, a wing has a length of 18 bases. In some embodiments, a wing has a length of 19 bases. In some embodiments, a wing has a length of ten bases.

[0903] In some embodiments, a wing comprises one or more chiral internucleotidic linkages. In some embodiments, a wing comprises one or more natural phosphate linkages. In some embodiments, a wing comprises one or more chiral internucleotidic linkages and one or more natural phosphate linkages. In some embodiments, a wing comprises one or more chiral internucleotidic linkages and two or more natural phosphate linkages. In some embodiments, a wing comprises one or more chiral internucleotidic linkages and two or more natural phosphate linkages, wherein two or more natural phosphate linkages are consecutive. In some embodiments, a wing comprises no chiral internucleotidic linkages. In some embodiments, each wing linkage is a natural phosphate linkage. In some embodiments, a wing comprises no phosphate linkages. In some embodiments, each wing is independently a chiral internucleotidic linkage.

[0904] In some embodiments, each wing region independently comprises one or more chiral internucleotidic linkages. In some embodiments, each wing region independently comprises one or more natural phosphate linkages. In some embodiments, each wing region independently comprises one or more chiral internucleotidic linkages and one or more natural phosphate linkages. In some embodiments, each wing region independently comprises one or more chiral internucleotidic linkages and two or more natural phosphate linkages. In some embodiments, each wing region independently comprises one or more chiral internucleotidic linkages and two or more natural phosphate linkages, wherein two or more natural phosphate linkages are consecutive.

[0905] In some embodiments, each wing region independently comprises at least one chiral internucleotidic linkage. In some embodiments, each wing region independently comprises at least two chiral internucleotidic linkages. In some embodiments, each wing region independently comprises at least three chiral internucleotidic linkages. In some embodiments, each wing region independently comprises at least four chiral internucleotidic linkages. In some embodiments, each wing region independently comprises at least five chiral internucleotidic linkages. In some embodiments, each wing region independently comprises at least six chiral internucleotidic linkages. In some embodiments, each wing region independently comprises at least seven chiral internucleotidic linkages. In some embodiments, each wing region independently comprises at least eight chiral internucleotidic linkages. In some embodiments, each wing region independently comprises at least nine chiral internucleotidic linkages. In some embodiments, each wing region independently comprises at least ten chiral internucleotidic linkages. In some embodiments, each wing region independently comprises at least 11 chiral internucleotidic linkages. In some embodiments, each wing region independently comprises at least 12 chiral internucleotidic linkages. In some embodiments, each wing region independently comprises at least 13 chiral internucleotidic linkages. In some embodiments, each wing region independently comprises at least 14 chiral internucleotidic linkages. In some embodiments, each wing region independently comprises at least 15 chiral internucleotidic linkages. In some embodiments, each wing region independently comprises at least 16 chiral internucleotidic linkages. In some embodiments, each wing region independently comprises at least 17 chiral internucleotidic linkages. In some embodiments, each wing region independently comprises at least 18 chiral internucleotidic linkages. In some embodiments, each wing region independently comprises at least 19 chiral internucleotidic linkages. In some embodiments, each wing region independently comprises at least 20 chiral internucleotidic linkages.

[0906] In some embodiments, each wing region independently comprises one chiral internucleotidic linkage. In some embodiments, each wing region independently comprises two chiral internucleotidic linkages. In some embodiments, each wing region independently comprises three chiral internucleotidic linkages. In some embodiments, each wing region independently comprises four chiral internucleotidic linkages. In some embodiments, each wing region independently comprises five chiral internucleotidic linkages. In some embodiments, each wing region independently comprises six chiral internucleotidic linkages. In some embodiments, each wing region independently comprises seven chiral internucleotidic linkages. In some embodiments, each wing region independently comprises eight chiral internucleotidic linkages. In some embodiments, each wing region independently comprises nine chiral internucleotidic linkages. In some embodiments, each wing region independently comprises ten chiral internucleotidic linkages. In some embodiments, each wing region independently comprises 11 chiral internucleotidic linkages. In some embodiments, each wing region independently comprises 12 chiral internucleotidic linkages. In some embodiments, each wing region independently comprises 13 chiral internucleotidic linkages. In some embodiments, each wing region independently comprises 14 chiral internucleotidic linkages. In some embodiments, each wing region independently comprises 15 chiral internucleotidic linkages. In some embodiments, each wing region independently comprises 16 chiral internucleotidic linkages. In some embodiments, each wing region independently comprises 17 chiral internucleotidic linkages. In some embodiments, each wing region independently comprises 18 chiral internucleotidic linkages. In some embodiments, each wing region independently comprises 19 chiral internucleotidic linkages. In some embodiments, each wing region independently comprises 20 chiral internucleotidic linkages.

[0907] In some embodiments, each wing region independently comprises at least one consecutive natural phosphate linkage. In some embodiments, each wing region independently comprises at least two consecutive chiral internucleotidic linkages. In some embodiments, each wing region independently comprises at least three consecutive chiral internucleotidic linkages. In some embodiments, each wing region independently comprises at least four consecutive chiral internucleotidic linkages. In some embodiments, each wing region independently comprises at least five consecutive chiral internucleotidic linkages. In some embodiments, each wing region independently comprises at least six consecutive chiral internucleotidic linkages. In some embodiments, each wing region independently comprises at least seven consecutive chiral internucleotidic linkages. In some embodiments, each wing region independently comprises at least eight consecutive chiral internucleotidic linkages. In some embodiments, each wing region independently comprises at least nine consecutive chiral internucleotidic linkages. In some embodiments, each wing region independently comprises at least ten consecutive chiral internucleotidic linkages. In some embodiments, each wing region independently comprises at least 11 consecutive chiral internucleotidic linkages. In some embodiments, each wing region independently comprises at least 12 consecutive chiral internucleotidic linkages. In some embodiments, each wing region independently comprises at least 13 consecutive chiral internucleotidic linkages. In some embodiments, each wing region independently comprises at least 14 consecutive chiral internucleotidic linkages. In some embodiments, each wing region independently comprises at least 15 consecutive chiral internucleotidic linkages. In some embodiments, each wing region independently comprises at least 16 consecutive chiral internucleotidic linkages. In some embodiments, each wing region independently comprises at least 17 consecutive chiral internucleotidic linkages. In some embodiments, each wing region independently comprises at least 18 consecutive chiral internucleotidic linkages. In some embodiments, each wing region independently comprises at least 19 consecutive chiral internucleotidic linkages. In some embodiments, each wing region independently comprises at least 20 consecutive chiral internucleotidic linkages.

[0908] In some embodiments, each wing region independently comprises one consecutive natural phosphate linkage. In some embodiments, each wing region independently comprises two consecutive chiral internucleotidic linkages. In some embodiments, each wing region independently comprises three consecutive chiral internucleotidic linkages. In some embodiments, each wing region independently comprises four consecutive chiral internucleotidic linkages. In some embodiments, each wing region independently comprises five consecutive chiral internucleotidic linkages. In some embodiments, each wing region independently comprises six consecutive chiral internucleotidic linkages. In some embodiments, each wing region independently comprises seven consecutive chiral internucleotidic linkages. In some embodiments, each wing region independently comprises eight consecutive chiral internucleotidic linkages. In some embodiments, each wing region independently comprises nine consecutive chiral internucleotidic linkages. In some embodiments, each wing region independently comprises ten consecutive chiral internucleotidic linkages. In some embodiments, each wing region independently comprises 11 consecutive chiral internucleotidic linkages. In some embodiments, each wing region independently comprises 12 consecutive chiral internucleotidic linkages. In some embodiments, each wing region independently comprises 13 consecutive chiral internucleotidic linkages. In some embodiments, each wing region independently comprises 14 consecutive chiral internucleotidic linkages. In some embodiments, each wing region independently comprises 15 consecutive chiral internucleotidic linkages. In some embodiments, each wing region independently comprises 16 consecutive chiral internucleotidic linkages. In some embodiments, each wing region independently comprises 17 consecutive chiral internucleotidic linkages. In some embodiments, each wing region independently comprises 18 consecutive chiral internucleotidic linkages. In some embodiments, each wing region independently comprises 19 consecutive chiral internucleotidic linkages. In some embodiments, each wing region independently comprises 20 consecutive chiral internucleotidic linkages.

[0909] In some embodiments, each wing region independently comprises at least one natural phosphate linkage. In some embodiments, each wing region independently comprises at least two natural phosphate linkages. In some embodiments, each wing region independently comprises at least three natural phosphate linkages. In some embodiments, each wing region independently comprises at least four natural phosphate linkages. In some embodiments, each wing region independently comprises at least five natural phosphate linkages. In some embodiments, each wing region independently comprises at least six natural phosphate linkages. In some embodiments, each wing region independently comprises at least seven natural phosphate linkages. In some embodiments, each wing region independently comprises at least eight natural phosphate linkages. In some embodiments, each wing region independently comprises at least nine natural phosphate linkages. In some embodiments, each wing region independently comprises at least ten natural phosphate linkages. In some embodiments, each wing region independently comprises at least 11 natural phosphate linkages. In some embodiments, each wing region independently comprises at least 12 natural phosphate linkages. In some embodiments, each wing region independently comprises at least 13 natural phosphate linkages. In some embodiments, each wing region independently comprises at least 14 natural phosphate linkages. In some embodiments, each wing region independently comprises at least 15 natural phosphate linkages. In some embodiments, each wing region independently comprises at least 16 natural phosphate linkages. In some embodiments, each wing region independently comprises at least 17 natural phosphate linkages. In some embodiments, each wing region independently comprises at least 18 natural phosphate linkages. In some embodiments, each wing region independently comprises at least 19 natural phosphate linkages. In some embodiments, each wing region independently comprises at least 20 natural phosphate linkages.

[0910] In some embodiments, each wing region independently comprises one natural phosphate linkage. In some embodiments, each wing region independently comprises two natural phosphate linkages. In some embodiments, each wing region independently comprises three natural phosphate linkages. In some embodiments, each wing region independently comprises four natural phosphate linkages. In some embodiments, each wing region independently comprises five natural phosphate linkages. In some embodiments, each wing region independently comprises six natural phosphate linkages. In some embodiments, each wing region independently comprises seven natural phosphate linkages. In some embodiments, each wing region independently comprises eight natural phosphate linkages. In some embodiments, each wing region independently comprises nine natural phosphate linkages. In some embodiments, each wing region independently comprises ten natural phosphate linkages. In some embodiments, each wing region independently comprises 11 natural phosphate linkages. In some embodiments, each wing region independently comprises 12 natural phosphate linkages. In some embodiments, each wing region independently comprises 13 natural phosphate linkages. In some embodiments, each wing region independently comprises 14 natural phosphate linkages. In some embodiments, each wing region independently comprises 15 natural phosphate linkages. In some embodiments, each wing region independently comprises 16 natural phosphate linkages. In some embodiments, each wing region independently comprises 17 natural phosphate linkages. In some embodiments, each wing region independently comprises 18 natural phosphate linkages. In some embodiments, each wing region independently comprises 19 natural phosphate linkages. In some embodiments, each wing region independently comprises 20 natural phosphate linkages.

[0911] In some embodiments, each wing region independently comprises at least one consecutive natural phosphate linkage. In some embodiments, each wing region independently comprises at least two consecutive natural phosphate linkages. In some embodiments, each wing region independently comprises at least three consecutive natural phosphate linkages. In some embodiments, each wing region independently comprises at least four consecutive natural phosphate linkages. In some embodiments, each wing region independently comprises at least five consecutive natural phosphate linkages. In some embodiments, each wing region independently comprises at least six consecutive natural phosphate linkages. In some embodiments, each wing region independently comprises at least seven consecutive natural phosphate linkages. In some embodiments, each wing region independently comprises at least eight consecutive natural phosphate linkages. In some embodiments, each wing region independently comprises at least nine consecutive natural phosphate linkages. In some embodiments, each wing region independently comprises at least ten consecutive natural phosphate linkages. In some embodiments, each wing region independently comprises at least 11 consecutive natural phosphate linkages. In some embodiments, each wing region independently comprises at least 12 consecutive natural phosphate linkages. In some embodiments, each wing region independently comprises at least 13 consecutive natural phosphate linkages. In some embodiments, each wing region independently comprises at least 14 consecutive natural phosphate linkages. In some embodiments, each wing region independently comprises at least 15 consecutive natural phosphate linkages. In some embodiments, each wing region independently comprises at least 16 consecutive natural phosphate linkages. In some embodiments, each wing region independently comprises at least 17 consecutive natural phosphate linkages. In some embodiments, each wing region independently comprises at least 18 consecutive natural phosphate linkages. In some embodiments, each wing region independently comprises at least 19 consecutive natural phosphate linkages. In some embodiments, each wing region independently comprises at least 20 consecutive natural phosphate linkages.

[0912] In some embodiments, each wing region independently comprises one consecutive natural phosphate linkage. In some embodiments, each wing region independently comprises two consecutive natural phosphate linkages. In some embodiments, each wing region independently comprises three consecutive natural phosphate linkages. In some embodiments, each wing region independently comprises four consecutive natural phosphate linkages. In some embodiments, each wing region independently comprises five consecutive natural phosphate linkages. In some embodiments, each wing region independently comprises six consecutive natural phosphate linkages. In some embodiments, each wing region independently comprises seven consecutive natural phosphate linkages. In some embodiments, each wing region independently comprises eight consecutive natural phosphate linkages. In some embodiments, each wing region independently comprises nine consecutive natural phosphate linkages. In some embodiments, each wing region independently comprises ten consecutive natural phosphate linkages. In some embodiments, each wing region independently comprises 11 consecutive natural phosphate linkages. In some embodiments, each wing region independently comprises 12 consecutive natural phosphate linkages. In some embodiments, each wing region independently comprises 13 consecutive natural phosphate linkages. In some embodiments, each wing region independently comprises 14 consecutive natural phosphate linkages. In some embodiments, each wing region independently comprises 15 consecutive natural phosphate linkages. In some embodiments, each wing region independently comprises 16 consecutive natural phosphate linkages. In some embodiments, each wing region independently comprises 17 consecutive natural phosphate linkages. In some embodiments, each wing region independently comprises 18 consecutive natural phosphate linkages. In some embodiments, each wing region independently comprises 19 consecutive natural phosphate linkages. In some embodiments, each wing region independently comprises 20 consecutive natural phosphate linkages.

[0913] In some embodiments, a wing is to the 5′-end of a core (5′-end wing). In some embodiments, a wing is to the 3′-end of a core (3′-end wing).

[0914] In some embodiments, a 5′-end wing comprises one or more modified internucleotidic linkages and one or more natural phosphate internucleotidic linkages. In some embodiments, a 3′-end wing comprises one or more modified internucleotidic linkages and one or more natural phosphate internucleotidic linkages. In some embodiments, each wing independently comprises one or more modified internucleotidic linkages and one or more natural phosphate internucleotidic linkages.

[0915] In some embodiments, a 5′-end wing comprises a modified internucleotidic linkage having one or more natural phosphate linkages connecting two or more nucleosides after (to the 3′-end) the modified internucleotidic linkage in the 5′-end wing. For example, a 5′-end wing mG*SmGmCmAmC comprises a modified internucleotidic linkage (mG*SmG) which has three natural phosphate linkages connecting four nucleosides (mGmCmAmC) after the modified internucleotidic linkage in the 5′-end wing. In some embodiments, a 5′-end wing comprises a modified internucleotidic linkages followed by one or more natural phosphate linkages and/or one or more modified internucleotidic linkages, which are followed by one or more natural phosphate linkages in the 5′-end wing (for example, mG*SmG and mG*SmC in mG*SmG*SmCmAmC). In some embodiments, a 5′-end wing comprises a modified internucleotidic linkages followed by one or more natural phosphate linkages in the 5′-end wing. In some embodiments, a 5′-end wing comprises a modified internucleotidic linkages followed by one or more consecutive natural phosphate linkages in the 5′-end wing. In some embodiments, a 5′-end wing comprises a natural phosphate linkage between the two nucleosides at its 3′-end. For example, a 5′-end wing mG*SmGmCmAmC has a natural phosphate linkage between the two nucleosides at its 3′-end (mG*SmGmCmAmC).

[0916] In some embodiments, a 3′-end wing comprises a modified internucleotidic linkage having one or more natural phosphate linkages connecting two or more nucleosides before (to the 5′-end) the modified internucleotidic linkage in the 3′-end wing. For example, a 3′-end wing mAmCmUmU*SmC comprises a modified internucleotidic linkage (mU*SmC) which has three natural phosphate linkages connecting four nucleosides (mAmCmUmU) before the modified internucleotidic linkage in the 3′-end wing. In some embodiments, a 3′-end wing comprises a modified internucleotidic linkages preceded by one or more natural phosphate linkages and/or one or more modified internucleotidic linkages, which are preceded by one or more natural phosphate linkages in the 3′-end wing (for example, mU*SmU and mU*SmC in mAmCmU*SmU*SmC). In some embodiments, a 3′-end wing comprises a modified internucleotidic linkages preceded by one or more natural phosphate linkages in the 3′-end wing. In some embodiments, a 3′-end wing comprises a modified internucleotidic linkages preceded by one or more consecutive natural phosphate linkages in the 3′-end wing. In some embodiments, a 3′-end wing comprises a natural phosphate linkage between the two nucleosides at its 5′-end. For example, a 3′-end wing having the structure of mAmCmUmU*SmC has a natural phosphate linkage between the two nucleosides at its 5′-end (mAmCmUmU*SmC).

[0917] In some embodiments, one or more is one. In some embodiments, one or more is two. In some embodiments, one or more is three. In some embodiments, one or more is four. In some embodiments, one or more is five. In some embodiments, one or more is six. In some embodiments, one or more is seven. In some embodiments, one or more is eight. In some embodiments, one or more is nine. In some embodiments, one or more is ten. In some embodiments, one or more is at least one. In some embodiments, one or more is at least two. In some embodiments, one or more is at least three. In some embodiments, one or more is at least four. In some embodiments, one or more is at least five. In some embodiments, one or more is at least six. In some embodiments, one or more is at least seven. In some embodiments, one or more is at least eight. In some embodiments, one or more is at least nine. In some embodiments, one or more is at least ten.

[0918] In some embodiments, a wing comprises only one chiral internucleotidic linkage. In some embodiments, a 5′-end wing comprises only one chiral internucleotidic linkage. In some embodiments, a 5′-end wing comprises only one chiral internucleotidic linkage at the 5′-end of the wing. In some embodiments, a 5′-end wing comprises only one chiral internucleotidic linkage at the 5′-end of the wing, and the chiral internucleotidic linkage is Rp. In some embodiments, a 5′-end wing comprises only one chiral internucleotidic linkage at the 5′-end of the wing, and the chiral internucleotidic linkage is Sp. In some embodiments, a 3′-end wing comprises only one chiral internucleotidic linkage at the 3′-end of the wing. In some embodiments, a 3′-end wing comprises only one chiral internucleotidic linkage at the 3′-end of the wing, and the chiral internucleotidic linkage is Rp. In some embodiments, a 3′-end wing comprises only one chiral internucleotidic linkage at the 3′-end of the wing, and the chiral internucleotidic linkage is Sp.

[0919] In some embodiments, a wing comprises two or more natural phosphate linkages. In some embodiments, all phosphate linkages within a wing are consecutive, and there are no non-phosphate linkages between any two phosphate linkages within a wing.

[0920] In some embodiments, a linkage connecting a wing and a core is considered part of the core when describing linkages, e.g., linkage chemistry, linkage stereochemistry, etc.

[0921] In some embodiments, a 5′-internucleotidic linkage connected to a sugar moiety without a 2′-modification is a modified linkage. In some embodiments, a 5′-internucleotidic linkage connected to a sugar moiety without a 2′-modification is a linkage having the structure of formula I. In some embodiments, a 5′-internucleotidic linkage connected to a sugar moiety without a 2′-modification is phosphorothioate linkage. In some embodiments, a 5′-internucleotidic linkage connected to a sugar moiety without a 2′-modification is a substituted phosphorothioate linkage. In some embodiments, a 5′-internucleotidic linkage connected to a sugar moiety without a 2′-modification is a phosphorothioate triester linkage. In some embodiments, each 5′-internucleotidic linkage connected to a sugar moiety without a 2′-modification is a modified linkage. In some embodiments, each 5′-internucleotidic linkage connected to a sugar moiety without a 2′-modification is a linkage having the structure of formula I. In some embodiments, each 5′-internucleotidic linkage connected to a sugar moiety without a 2′-modification is phosphorothioate linkage. In some embodiments, each 5′-internucleotidic linkage connected to a sugar moiety without a 2′-modification is a substituted phosphorothioate linkage. In some embodiments, each 5′-internucleotidic linkage connected to a sugar moiety without a 2′-modification is a phosphorothioate triester linkage.

[0922] In some embodiments, a 3′-internucleotidic linkage connected to a sugar moiety without a 2′-modification is a modified linkage. In some embodiments, a 3′-internucleotidic linkage connected to a sugar moiety without a 2′-modification is a linkage having the structure of formula I. In some embodiments, a 3′-internucleotidic linkage connected to a sugar moiety without a 2′-modification is phosphorothioate linkage. In some embodiments, a 3′-internucleotidic linkage connected to a sugar moiety without a 2′-modification is a substituted phosphorothioate linkage. In some embodiments, a 3′-internucleotidic linkage connected to a sugar moiety without a 2′-modification is a phosphorothioate triester linkage. In some embodiments, each 3′-internucleotidic linkage connected to a sugar moiety without a 2′-modification is a modified linkage. In some embodiments, each 3′-internucleotidic linkage connected to a sugar moiety without a 2′-modification is a linkage having the structure of formula I. In some embodiments, each 3′-internucleotidic linkage connected to a sugar moiety without a 2′-modification is phosphorothioate linkage. In some embodiments, each 3′-internucleotidic linkage connected to a sugar moiety without a 2′-modification is a substituted phosphorothioate linkage. In some embodiments, each 3′-internucleotidic linkage connected to a sugar moiety without a 2′-modification is a phosphorothioate triester linkage.

[0923] In some embodiments, both internucleotidic linkages connected to a sugar moiety without a 2′-modification are modified linkages. In some embodiments, both internucleotidic linkages connected to a sugar moiety without a 2′-modification are linkage having the structure of formula I. In some embodiments, both internucleotidic linkages connected to a sugar moiety without a 2′-modification are phosphorothioate linkages. In some embodiments, both internucleotidic linkages connected to a sugar moiety without a 2′-modification are substituted phosphorothioate linkages. In some embodiments, both internucleotidic linkages connected to a sugar moiety without a 2′-modification are phosphorothioate triester linkages. In some embodiments, each internucleotidic linkage connected to a sugar moiety without a 2′-modification is a modified linkage. In some embodiments, each internucleotidic linkage connected to a sugar moiety without a 2′-modification is a linkage having the structure of formula I. In some embodiments, each internucleotidic linkage connected to a sugar moiety without a 2′-modification is phosphorothioate linkage. In some embodiments, each internucleotidic linkage connected to a sugar moiety without a 2′-modification is a substituted phosphorothioate linkage. In some embodiments, each internucleotidic linkage connected to a sugar moiety without a 2′-modification is a phosphorothioate triester linkage.

[0924] In some embodiments, a sugar moiety without a 2′-modification is a sugar moiety found in a natural DNA nucleoside.

[0925] In some embodiments, for a wing-core-wing structure, the 5′-end wing comprises only one chiral internucleotidic linkage. In some embodiments, for a wing-core-wing structure, the 5′-end wing comprises only one chiral internucleotidic linkage at the 5′-end of the wing. In some embodiments, for a wing-core-wing structure, the 3′-end wing comprises only one chiral internucleotidic linkage. In some embodiments, for a wing-core-wing structure, the 3′-end wing comprises only one chiral internucleotidic linkage at the 3′-end of the wing. In some embodiments, for a wing-core-wing structure, each wing comprises only one chiral internucleotidic linkage. In some embodiments, for a wing-core-wing structure, each wing comprises only one chiral internucleotidic linkage, wherein the 5′-end wing comprises only one chiral internucleotidic linkage at its 5′-end; and the 3′-end wing comprises only one chiral internucleotidic linkage at its 3′-end. In some embodiments, the only chiral internucleotidic linkage in the 5′-wing is Rp. In some embodiments, the only chiral internucleotidic linkage in the 5′-wing is Sp. In some embodiments, the only chiral internucleotidic linkage in the 3′-wing is Rp. In some embodiments, the only chiral internucleotidic linkage in the 3′-wing is Sp. In some embodiments, the only chiral internucleotidic linkage in both the 5′- and the 3′-wings are Sp. In some embodiments, the only chiral internucleotidic linkage in both the 5′- and the 3′-wings are Rp. In some embodiments, the only chiral internucleotidic linkage in the 5′-wing is Sp, and the only chiral internucleotidic linkage in the 3′-wing is Rp. In some embodiments, the only chiral internucleotidic linkage in the 5′-wing is Rp, and the only chiral internucleotidic linkage in the 3′-wing is Sp.

[0926] In some embodiments, a wing comprises two chiral internucleotidic linkages. In some embodiments, a wing comprises only two chiral internucleotidic linkages, and one or more natural phosphate linkages. In some embodiments, a wing comprises only two chiral internucleotidic linkages, and two or more natural phosphate linkages. In some embodiments, a wing comprises only two chiral internucleotidic linkages, and two or more consecutive natural phosphate linkages. In some embodiments, a wing comprises only two chiral internucleotidic linkages, and two consecutive natural phosphate linkages. In some embodiments, a wing comprises only two chiral internucleotidic linkages, and three consecutive natural phosphate linkages. In some embodiments, a 5′-wing (to a core) comprises only two chiral internucleotidic linkages, one at its 5′-end and the other at its 3′-end, with one or more natural phosphate linkages in between. In some embodiments, a 5′-wing (to a core) comprises only two chiral internucleotidic linkages, one at its 5′-end and the other at its 3′-end, with two or more natural phosphate linkages in between. In some embodiments, a 3′-wing (to a core) comprises only two chiral internucleotidic linkages, one at its 3′-end and the other at its 3′-end, with one or more natural phosphate linkages in between. In some embodiments, a 3′-wing (to a core) comprises only two chiral internucleotidic linkages, one at its 3′-end and the other at its 3′-end, with two or more natural phosphate linkages in between.

[0927] In some embodiments, a 5′-wing comprises only two chiral internucleotidic linkages, one at its 5′-end and the other at its 3′-end, with one or more natural phosphate linkages in between, and the 3′-wing comprise only one internucleotidic linkage at its 3′-end. In some embodiments, a 5′-wing (to a core) comprises only two chiral internucleotidic linkages, one at its 5′-end and the other at its 3′-end, with two or more natural phosphate linkages in between, and the 3′-wing comprise only one internucleotidic linkage at its 3′-end. In some embodiments, each chiral internucleotidic linkage independently has its own stereochemistry. In some embodiments, both chiral internucleotidic linkages in the 5′-wing have the same stereochemistry. In some embodiments, both chiral internucleotidic linkages in the 5′-wing have different stereochemistry. In some embodiments, both chiral internucleotidic linkages in the 5′-wing are Rp. In some embodiments, both chiral internucleotidic linkages in the 5′-wing are Sp. In some embodiments, chiral internucleotidic linkages in the 5′- and 3′-wings have the same stereochemistry. In some embodiments, chiral internucleotidic linkages in the 5′- and 3′-wings are Rp. In some embodiments, chiral internucleotidic linkages in the 5′- and 3′-wings are Sp. In some embodiments, chiral internucleotidic linkages in the 5′- and 3′-wings have different stereochemistry.

[0928] In some embodiments, a chiral, modified phosphate linkage is a chiral phosphorothioate linkage, i.e., phosphorothioate internucleotidic linkage. In some embodiments, a wing region comprises at least 5%, 10%, 15%, 20%, 25%, 30%, 35%, 40%, 45%, 50%, 55%, 60%, 65%, 70%, 75%, 80%, 85%, 90%, 95%, or 100% chiral phosphorothioate internucleotidic linkages. In some embodiments, all chiral, modified phosphate linkages are chiral phosphorothioate internucleotidic linkages. In some embodiments, at least about 10%, 20%, 30%, 40%, 50%, 60%, 70%, 80%, or 90% chiral phosphorothioate internucleotidic linkages of a wing region are of the Sp conformation. In some embodiments, at least about 10% chiral phosphorothioate internucleotidic linkages of a wing region are of the Sp conformation. In some embodiments, at least about 20% chiral phosphorothioate internucleotidic linkages of a wing region are of the Sp conformation. In some embodiments, at least about 30% chiral phosphorothioate internucleotidic linkages of a wing region are of the Sp conformation. In some embodiments, at least about 40% chiral phosphorothioate internucleotidic linkages of a wing region are of the Sp conformation. In some embodiments, at least about 50% chiral phosphorothioate internucleotidic linkages of a wing region are of the Sp conformation. In some embodiments, at least about 60% chiral phosphorothioate internucleotidic linkages of a wing region are of the Sp conformation. In some embodiments, at least about 70% chiral phosphorothioate internucleotidic linkages of a wing region are of the Sp conformation. In some embodiments, at least about 80% chiral phosphorothioate internucleotidic linkages of a wing region are of the Sp conformation. In some embodiments, at least about 90% chiral phosphorothioate internucleotidic linkages of a wing region are of the Sp conformation. In some embodiments, at least about 95% chiral phosphorothioate internucleotidic linkages of a wing region are of the Sp conformation.

[0929] In some embodiments, at least about 1 chiral phosphorothioate internucleotidic linkage of a wing region is of the Sp conformation. In some embodiments, at least about 2 chiral phosphorothioate internucleotidic linkages of a wing region are of the Sp conformation. In some embodiments, at least about 3 chiral phosphorothioate internucleotidic linkages of a wing region are of the Sp conformation. In some embodiments, at least about 4 chiral phosphorothioate internucleotidic linkages of a wing region are of the Sp conformation. In some embodiments, at least about 5 chiral phosphorothioate internucleotidic linkages of a wing region are of the Sp conformation. In some embodiments, at least about 6 chiral phosphorothioate internucleotidic linkages of a wing region are of the Sp conformation. In some embodiments, at least about 7 chiral phosphorothioate internucleotidic linkages of a wing region are of the Sp conformation. In some embodiments, at least about 8 chiral phosphorothioate internucleotidic linkages of a wing region are of the Sp conformation. In some embodiments, at least about 9 chiral phosphorothioate internucleotidic linkages of a wing region are of the Sp conformation.

[0930] In some embodiments, at least about 2 consecutive chiral phosphorothioate internucleotidic linkages of a wing region are of the Sp conformation. In some embodiments, at least about 3 consecutive chiral phosphorothioate internucleotidic linkages of a wing region are of the Sp conformation. In some embodiments, at least about 4 consecutive chiral phosphorothioate internucleotidic linkages of a wing region are of the Sp conformation. In some embodiments, at least about 5 consecutive chiral phosphorothioate internucleotidic linkages of a wing region are of the Sp conformation. In some embodiments, at least about 6 consecutive chiral phosphorothioate internucleotidic linkages of a wing region are of the Sp conformation. In some embodiments, at least about 7 consecutive chiral phosphorothioate internucleotidic linkages of a wing region are of the Sp conformation. In some embodiments, at least about 8 consecutive chiral phosphorothioate internucleotidic linkages of a wing region are of the Sp conformation. In some embodiments, at least about 9 consecutive chiral phosphorothioate internucleotidic linkages of a wing region are of the Sp conformation.

[0931] In some embodiments, at least about 10%, 20%, 30%, 40%, 50%, 60%, 70%, 80%, or 90% chiral phosphorothioate internucleotidic linkages of a wing region are of the Rp conformation. In some embodiments, at least about 10% chiral phosphorothioate internucleotidic linkages of a wing region are of the Rp conformation. In some embodiments, at least about 20% chiral phosphorothioate internucleotidic linkages of a wing region are of the Rp conformation. In some embodiments, at least about 30% chiral phosphorothioate internucleotidic linkages of a wing region are of the Rp conformation. In some embodiments, at least about 40% chiral phosphorothioate internucleotidic linkages of a wing region are of the Rp conformation. In some embodiments, at least about 50% chiral phosphorothioate internucleotidic linkages of a wing region are of the Rp conformation. In some embodiments, at least about 60% chiral phosphorothioate internucleotidic linkages of a wing region are of the Rp conformation. In some embodiments, at least about 70% chiral phosphorothioate internucleotidic linkages of a wing region are of the Rp conformation. In some embodiments, at least about 80% chiral phosphorothioate internucleotidic linkages of a wing region are of the Rp conformation. In some embodiments, at least about 90% chiral phosphorothioate internucleotidic linkages of a wing region are of the Rp conformation. In some embodiments, at least about 95% chiral phosphorothioate internucleotidic linkages of a wing region are of the Rp conformation.

[0932] In some embodiments, less than about 10%, 20%, 30%, 40%, 50%, 60%, 70%, 80%, or 90% chiral phosphorothioate internucleotidic linkages of a wing region are of the Rp conformation. In some embodiments, less than about 10% chiral phosphorothioate internucleotidic linkages of a wing region are of the Rp conformation. In some embodiments, less than about 20% chiral phosphorothioate internucleotidic linkages of a wing region are of the Rp conformation. In some embodiments, less than about 30% chiral phosphorothioate internucleotidic linkages of a wing region are of the Rp conformation. In some embodiments, less than about 40% chiral phosphorothioate internucleotidic linkages of a wing region are of the Rp conformation. In some embodiments, less than about 50% chiral phosphorothioate internucleotidic linkages of a wing region are of the Rp conformation. In some embodiments, less than about 60% chiral phosphorothioate internucleotidic linkages of a wing region are of the Rp conformation. In some embodiments, less than about 70% chiral phosphorothioate internucleotidic linkages of a wing region are of the Rp conformation. In some embodiments, less than about 80% chiral phosphorothioate internucleotidic linkages of a wing region are of the Rp conformation. In some embodiments, less than about 90% chiral phosphorothioate internucleotidic linkages of a wing region are of the Rp conformation. In some embodiments, less than about 95% chiral phosphorothioate internucleotidic linkages of a wing region are of the Rp conformation. In some embodiments, a wing region has only one Rp chiral phosphorothioate internucleotidic linkages. In some embodiments, a wing region has only one Rp chiral phosphorothioate internucleotidic linkages, wherein all internucleotide linkages are chiral phosphorothioate internucleotidic linkages.

[0933] In some embodiments, at least about 1 chiral phosphorothioate internucleotidic linkage of a wing region is of the Rp conformation. In some embodiments, at least about 2 chiral phosphorothioate internucleotidic linkages of a wing region are of the Rp conformation. In some embodiments, at least about 3 chiral phosphorothioate internucleotidic linkages of a wing region are of the Rp conformation. In some embodiments, at least about 4 chiral phosphorothioate internucleotidic linkages of a wing region are of the Rp conformation. In some embodiments, at least about 5 chiral phosphorothioate internucleotidic linkages of a wing region are of the Rp conformation. In some embodiments, at least about 6 chiral phosphorothioate internucleotidic linkages of a wing region are of the Rp conformation. In some embodiments, at least about 7 chiral phosphorothioate internucleotidic linkages of a wing region are of the Rp conformation. In some embodiments, at least about 8 chiral phosphorothioate internucleotidic linkages of a wing region are of the Rp conformation. In some embodiments, at least about 9 chiral phosphorothioate internucleotidic linkages of a wing region are of the Rp conformation.

[0934] In some embodiments, at least about 2 consecutive chiral phosphorothioate internucleotidic linkages of a wing region are of the Rp conformation. In some embodiments, at least about 3 consecutive chiral phosphorothioate internucleotidic linkages of a wing region are of the Rp conformation. In some embodiments, at least about 4 consecutive chiral phosphorothioate internucleotidic linkages of a wing region are of the Rp conformation. In some embodiments, at least about 5 consecutive chiral phosphorothioate internucleotidic linkages of a wing region are of the Rp conformation. In some embodiments, at least about 6 consecutive chiral phosphorothioate internucleotidic linkages of a wing region are of the Rp conformation. In some embodiments, at least about 7 consecutive chiral phosphorothioate internucleotidic linkages of a wing region are of the Rp conformation. In some embodiments, at least about 8 consecutive chiral phosphorothioate internucleotidic linkages of a wing region are of the Rp conformation. In some embodiments, at least about 9 consecutive chiral phosphorothioate internucleotidic linkages of a wing region are of the Rp conformation.

[0935] In some embodiments, a wing comprises one or more modified sugar moieties. In some embodiments, a wing comprises two or more modified sugar moieties. In some embodiments, a wing comprises three or more modified sugar moieties. In some embodiments, a wing comprises four or more modified sugar moieties. In some embodiments, a wing comprises five or more modified sugar moieties. In some embodiments, a wing comprises six or more modified sugar moieties. In some embodiments, a wing comprises seven or more modified sugar moieties. In some embodiments, a wing comprises eight or more modified sugar moieties. In some embodiments, a wing comprises nine or more modified sugar moieties. In some embodiments, a wing comprises ten or more modified sugar moieties. In some embodiments, a wing comprises 11 or more modified sugar moieties. In some embodiments, a wing comprises 12 or more modified sugar moieties. In some embodiments, a wing comprises 13 or more modified sugar moieties. In some embodiments, a wing comprises 14 or more modified sugar moieties. In some embodiments, a wing comprises 15 or more modified sugar moieties. In some embodiments, a wing comprises 16 or more modified sugar moieties. In some embodiments, a wing comprises 17 or more modified sugar moieties. In some embodiments, a wing comprises 18 or more modified sugar moieties. In some embodiments, a wing comprises 19 or more modified sugar moieties. In some embodiments, a wing comprises 20 or more modified sugar moieties. In some embodiments, a wing comprises 21 or more modified sugar moieties. In some embodiments, a wing comprises 22 or more modified sugar moieties. In some embodiments, a wing comprises 23 or more modified sugar moieties. In some embodiments, a wing comprises 24 or more modified sugar moieties. In some embodiments, a wing comprises 25 or more modified sugar moieties. In some embodiments, a wing comprises 30 or more modified sugar moieties. In some embodiments, a wing comprises 35 or more modified sugar moieties.

[0936] In some embodiments, a wing comprises one or more 2′-modified sugar moieties. In some embodiments, a wing comprises two or more 2′-modified sugar moieties. In some embodiments, a wing comprises three or more 2′-modified sugar moieties. In some embodiments, a wing comprises four or more 2′-modified sugar moieties. In some embodiments, a wing comprises five or more 2′-modified sugar moieties. In some embodiments, a wing comprises six or more 2′-modified sugar moieties. In some embodiments, a wing comprises seven or more 2′-modified sugar moieties. In some embodiments, a wing comprises eight or more 2′-modified sugar moieties. In some embodiments, a wing comprises nine or more 2′-modified sugar moieties. In some embodiments, a wing comprises ten or more 2′-modified sugar moieties. In some embodiments, a wing comprises 11 or more 2′-modified sugar moieties. In some embodiments, a wing comprises 12 or more 2′-modified sugar moieties. In some embodiments, a wing comprises 13 or more 2′-modified sugar moieties. In some embodiments, a wing comprises 14 or more 2′-modified sugar moieties. In some embodiments, a wing comprises 15 or more 2′-modified sugar moieties. In some embodiments, a wing comprises 16 or more 2′-modified sugar moieties. In some embodiments, a wing comprises 17 or more 2′-modified sugar moieties. In some embodiments, a wing comprises 18 or more 2′-modified sugar moieties. In some embodiments, a wing comprises 19 or more 2′-modified sugar moieties. In some embodiments, a wing comprises 20 or more 2′-modified sugar moieties. In some embodiments, a wing comprises 21 or more 2′-modified sugar moieties. In some embodiments, a wing comprises 22 or more 2′-modified sugar moieties. In some embodiments, a wing comprises 23 or more 2′-modified sugar moieties. In some embodiments, a wing comprises 24 or more 2′-modified sugar moieties. In some embodiments, a wing comprises 25 or more 2′-modified sugar moieties. In some embodiments, a wing comprises 30 or more 2′-modified sugar moieties. In some embodiments, a wing comprises 35 or more 2′-modified sugar moieties.

[0937] In some embodiments, a wing comprises one or more 2′-F. In some embodiments, a wing comprises two or more 2′-F. In some embodiments, a wing comprises three or more 2′-F. In some embodiments, a wing comprises four or more 2′-F. In some embodiments, a wing comprises five or more 2′-F. In some embodiments, a wing comprises six or more 2′-F. In some embodiments, a wing comprises seven or more 2′-F. In some embodiments, a wing comprises eight or more 2′-F. In some embodiments, a wing comprises nine or more 2′-F. In some embodiments, a wing comprises ten or more 2′-F. In some embodiments, a wing comprises 11 or more 2′-F. In some embodiments, a wing comprises 12 or more 2′-F. In some embodiments, a wing comprises 13 or more 2′-F. In some embodiments, a wing comprises 14 or more 2′-F. In some embodiments, a wing comprises 15 or more 2′-F. In some embodiments, a wing comprises 16 or more 2′-F. In some embodiments, a wing comprises 17 or more 2′-F. In some embodiments, a wing comprises 18 or more 2′-F. In some embodiments, a wing comprises 19 or more 2′-F. In some embodiments, a wing comprises 20 or more 2′-F. In some embodiments, a wing comprises 21 or more 2′-F. In some embodiments, a wing comprises 22 or more 2′-F. In some embodiments, a wing comprises 23 or more 2′-F. In some embodiments, a wing comprises 24 or more 2′-F. In some embodiments, a wing comprises 25 or more 2′-F. In some embodiments, a wing comprises 30 or more 2′-F. In some embodiments, a wing comprises 35 or more 2′-F.

[0938] In some embodiments, a wing comprises one 2′-F. In some embodiments, a wing comprises two 2′-F. In some embodiments, a wing comprises three 2′-F. In some embodiments, a wing comprises four 2′-F. In some embodiments, a wing comprises five 2′-F. In some embodiments, a wing comprises six 2′-F. In some embodiments, a wing comprises seven 2′-F. In some embodiments, a wing comprises eight 2′-F. In some embodiments, a wing comprises nine 2′-F. In some embodiments, a wing comprises ten 2′-F. In some embodiments, a wing comprises 11 2′-F. In some embodiments, a wing comprises 12 2′-F. In some embodiments, a wing comprises 13 2′-F. In some embodiments, a wing comprises 14 2′-F. In some embodiments, a wing comprises 15 2′-F. In some embodiments, a wing comprises 16 2′-F. In some embodiments, a wing comprises 17 2′-F. In some embodiments, a wing comprises 18 2′-F. In some embodiments, a wing comprises 19 2′-F. In some embodiments, a wing comprises 20 2′-F. In some embodiments, a wing comprises 21 2′-F. In some embodiments, a wing comprises 22 2′-F. In some embodiments, a wing comprises 23 2′-F. In some embodiments, a wing comprises 24 2′-F. In some embodiments, a wing comprises 25 2′-F. In some embodiments, a wing comprises 30 2′-F. In some embodiments, a wing comprises 35 2′-F.

[0939] In some embodiments, a wing comprises one or more consecutive 2′-F. In some embodiments, a wing comprises two or more consecutive 2′-F. In some embodiments, a wing comprises three or more consecutive 2′-F. In some embodiments, a wing comprises four or more consecutive 2′-F. In some embodiments, a wing comprises five or more consecutive 2′-F. In some embodiments, a wing comprises six or more consecutive 2′-F. In some embodiments, a wing comprises seven or more consecutive 2′-F. In some embodiments, a wing comprises eight or more consecutive 2′-F. In some embodiments, a wing comprises nine or more consecutive 2′-F. In some embodiments, a wing comprises ten or more consecutive 2′-F. In some embodiments, a wing comprises 11 or more consecutive 2′-F. In some embodiments, a wing comprises 12 or more consecutive 2′-F. In some embodiments, a wing comprises 13 or more consecutive 2′-F. In some embodiments, a wing comprises 14 or more consecutive 2′-F. In some embodiments, a wing comprises 15 or more consecutive 2′-F. In some embodiments, a wing comprises 16 or more consecutive 2′-F. In some embodiments, a wing comprises 17 or more consecutive 2′-F. In some embodiments, a wing comprises 18 or more consecutive 2′-F. In some embodiments, a wing comprises 19 or more consecutive 2′-F. In some embodiments, a wing comprises 20 or more consecutive 2′-F. In some embodiments, a wing comprises 21 or more consecutive 2′-F. In some embodiments, a wing comprises 22 or more consecutive 2′-F. In some embodiments, a wing comprises 23 or more consecutive 2′-F. In some embodiments, a wing comprises 24 or more consecutive 2′-F. In some embodiments, a wing comprises 25 or more consecutive 2′-F. In some embodiments, a wing comprises 30 or more consecutive 2′-F. In some embodiments, a wing comprises 35 or more consecutive 2′-F.

[0940] In some embodiments, a wing comprises one consecutive 2′-F. In some embodiments, a wing comprises two consecutive 2′-F. In some embodiments, a wing comprises three consecutive 2′-F. In some embodiments, a wing comprises four consecutive 2′-F. In some embodiments, a wing comprises five consecutive 2′-F. In some embodiments, a wing comprises six consecutive 2′-F. In some embodiments, a wing comprises seven consecutive 2′-F. In some embodiments, a wing comprises eight consecutive 2′-F. In some embodiments, a wing comprises nine consecutive 2′-F. In some embodiments, a wing comprises ten consecutive 2′-F. In some embodiments, a wing comprises 11 consecutive 2′-F. In some embodiments, a wing comprises 12 consecutive 2′-F. In some embodiments, a wing comprises 13 consecutive 2′-F. In some embodiments, a wing comprises 14 consecutive 2′-F. In some embodiments, a wing comprises 15 consecutive 2′-F. In some embodiments, a wing comprises 16 consecutive 2′-F. In some embodiments, a wing comprises 17 consecutive 2′-F. In some embodiments, a wing comprises 18 consecutive 2′-F. In some embodiments, a wing comprises 19 consecutive 2′-F. In some embodiments, a wing comprises 20 consecutive 2′-F. In some embodiments, a wing comprises 21 consecutive 2′-F. In some embodiments, a wing comprises 22 consecutive 2′-F. In some embodiments, a wing comprises 23 consecutive 2′-F. In some embodiments, a wing comprises 24 consecutive 2′-F. In some embodiments, a wing comprises 25 consecutive 2′-F. In some embodiments, a wing comprises 30 consecutive 2′-F. In some embodiments, a wing comprises 35 consecutive 2′-F.

[0941] In some embodiments, a core region has a length of one or more bases. In some embodiments, a core region has a length of two or more bases. In some embodiments, a core region has a length of three or more bases. In some embodiments, a core region has a length of four or more bases. In some embodiments, a core region has a length of five or more bases. In some embodiments, a core region has a length of six or more bases. In some embodiments, a core region has a length of seven or more bases. In some embodiments, a core region has a length of eight or more bases. In some embodiments, a core region has a length of nine or more bases. In some embodiments, a core region has a length of ten or more bases. In some embodiments, a core region has a length of 11, 12, 13, 14, 15, 16, 17, 18, 19, 20, 25, or more bases. In certain embodiments, a core region has a length of 11 or more bases. In certain embodiments, a core region has a length of 12 or more bases. In certain embodiments, a core region has a length of 13 or more bases. In certain embodiments, a core region has a length of 14 or more bases. In certain embodiments, a core region has a length of 15 or more bases. In certain embodiments, a core region has a length of 16 or more bases. In certain embodiments, a core region has a length of 17 or more bases. In certain embodiments, a core region has a length of 18 or more bases. In certain embodiments, a core region has a length of 19 or more bases. In certain embodiments, a core region has a length of 20 or more bases. In certain embodiments, a core region has a length of more than 20 bases. In certain embodiments, a core region has a length of 2 bases. In certain embodiments, a core region has a length of 3 bases. In certain embodiments, a core region has a length of 4 bases. In certain embodiments, a core region has a length of 5 bases. In certain embodiments, a core region has a length of 6 bases. In certain embodiments, a core region has a length of 7 bases. In certain embodiments, a core region has a length of 8 bases. In certain embodiments, a core region has a length of 9 bases. In certain embodiments, a core region has a length of 10 bases. In certain embodiments, a core region has a length of 11 bases. In certain embodiments, a core region has a length of 12 bases. In certain embodiments, a core region has a length of 13 bases. In certain embodiments, a core region has a length of 14 bases. In certain embodiments, a core region has a length of 15 bases. In certain embodiments, a core region has a length of 16 bases. In certain embodiments, a core region has a length of 17 bases. In certain embodiments, a core region has a length of 18 bases. In certain embodiments, a core region has a length of 19 bases. In certain embodiments, a core region has a length of 20 bases.

[0942] In some embodiments, a core comprises one or more modified internucleotidic linkages. In some embodiments, a core comprises one or more natural phosphate linkages. In some embodiments, a core independently comprises one or more modified internucleotidic linkages and one or more natural phosphate linkages. In some embodiments, a core comprises no natural phosphate linkages. In some embodiments, each core linkage is a modified internucleotidic linkage.

[0943] In some embodiments, a core comprises at least one natural phosphate linkage. In some embodiments, a core comprises at least two modified internucleotidic linkages. In some embodiments, a core comprises at least three modified internucleotidic linkages. In some embodiments, a core comprises at least four modified internucleotidic linkages. In some embodiments, a core comprises at least five modified internucleotidic linkages. In some embodiments, a core comprises at least six modified internucleotidic linkages. In some embodiments, a core comprises at least seven modified internucleotidic linkages. In some embodiments, a core comprises at least eight modified internucleotidic linkages. In some embodiments, a core comprises at least nine modified internucleotidic linkages. In some embodiments, a core comprises at least ten modified internucleotidic linkages. In some embodiments, a core comprises at least 11 modified internucleotidic linkages. In some embodiments, a core comprises at least 12 modified internucleotidic linkages. In some embodiments, a core comprises at least 13 modified internucleotidic linkages. In some embodiments, a core comprises at least 14 modified internucleotidic linkages. In some embodiments, a core comprises at least 15 modified internucleotidic linkages. In some embodiments, a core comprises at least 16 modified internucleotidic linkages. In some embodiments, a core comprises at least 17 modified internucleotidic linkages. In some embodiments, a core comprises at least 18 modified internucleotidic linkages. In some embodiments, a core comprises at least 19 modified internucleotidic linkages. In some embodiments, a core comprises at least 20 modified internucleotidic linkages.

[0944] In some embodiments, a core comprises one or more chiral internucleotidic linkages. In some embodiments, a core comprises one or more natural phosphate linkages. In some embodiments, a core independently comprises one or more chiral internucleotidic linkages and one or more natural phosphate linkages. In some embodiments, a core comprises no natural phosphate linkages. In some embodiments, each core linkage is a chiral internucleotidic linkage.

[0945] In some embodiments, a core comprises at least one natural phosphate linkage. In some embodiments, a core comprises at least two chiral internucleotidic linkages. In some embodiments, a core comprises at least three chiral internucleotidic linkages. In some embodiments, a core comprises at least four chiral internucleotidic linkages. In some embodiments, a core comprises at least five chiral internucleotidic linkages. In some embodiments, a core comprises at least six chiral internucleotidic linkages. In some embodiments, a core comprises at least seven chiral internucleotidic linkages. In some embodiments, a core comprises at least eight chiral internucleotidic linkages. In some embodiments, a core comprises at least nine chiral internucleotidic linkages. In some embodiments, a core comprises at least ten chiral internucleotidic linkages. In some embodiments, a core comprises at least 11 chiral internucleotidic linkages. In some embodiments, a core comprises at least 12 chiral internucleotidic linkages. In some embodiments, a core comprises at least 13 chiral internucleotidic linkages. In some embodiments, a core comprises at least 14 chiral internucleotidic linkages. In some embodiments, a core comprises at least 15 chiral internucleotidic linkages. In some embodiments, a core comprises at least 16 chiral internucleotidic linkages. In some embodiments, a core comprises at least 17 chiral internucleotidic linkages. In some embodiments, a core comprises at least 18 chiral internucleotidic linkages. In some embodiments, a core comprises at least 19 chiral internucleotidic linkages. In some embodiments, a core comprises at least 20 chiral internucleotidic linkages.

[0946] In some embodiments, a core comprises one natural phosphate linkage. In some embodiments, a core comprises two chiral internucleotidic linkages. In some embodiments, a core comprises three chiral internucleotidic linkages. In some embodiments, a core comprises four chiral internucleotidic linkages. In some embodiments, a core comprises five chiral internucleotidic linkages. In some embodiments, a core comprises six chiral internucleotidic linkages. In some embodiments, a core comprises seven chiral internucleotidic linkages. In some embodiments, a core comprises eight chiral internucleotidic linkages. In some embodiments, a core comprises nine chiral internucleotidic linkages. In some embodiments, a core comprises ten chiral internucleotidic linkages. In some embodiments, a core comprises 11 chiral internucleotidic linkages. In some embodiments, a core comprises 12 chiral internucleotidic linkages. In some embodiments, a core comprises 13 chiral internucleotidic linkages. In some embodiments, a core comprises 14 chiral internucleotidic linkages. In some embodiments, a core comprises 15 chiral internucleotidic linkages. In some embodiments, a core comprises 16 chiral internucleotidic linkages. In some embodiments, a core comprises 17 chiral internucleotidic linkages. In some embodiments, a core comprises 18 chiral internucleotidic linkages. In some embodiments, a core comprises 19 chiral internucleotidic linkages. In some embodiments, a core comprises 20 chiral internucleotidic linkages.

[0947] In some embodiments, a core region has a pattern of backbone chiral centers comprising (Sp)m(Rp)n, (Rp)n(Sp)m, (Np)t(Rp)n(Sp)m, or (Sp)t(Rp)n(Sp)m, wherein each of m, n, t and Np is independently as defined and described in the present disclosure. In some embodiments, a core region has a pattern of backbone chiral centers comprising (Sp)m(Rp)n, (Rp)n(Sp)m, (Np)t(Rp)n(Sp)m, or (Sp)t(Rp)n(Sp)m. In some embodiments, a core region has a pattern of backbone chiral centers comprising (Sp)m(Rp)n. In some embodiments, a core region has a pattern of backbone chiral centers comprising (Sp)m(Rp)n, wherein m>2 and n is 1. In some embodiments, a core region has a pattern of backbone chiral centers comprising (Rp)n(Sp)m. In some embodiments, a core region has a pattern of backbone chiral centers comprising (Rp)n(Sp)m, wherein m>2 and n is 1. In some embodiments, a core region has a pattern of backbone chiral centers comprising (Np)t(Rp)n(Sp)m. In some embodiments, a core region has a pattern of backbone chiral centers comprising (Np)t(Rp)n(Sp)m, wherein m>2 and n is 1. In some embodiments, a core region has a pattern of backbone chiral centers comprising (Np)t(Rp)n(Sp)m, wherein t>2, m>2 and n is 1. In some embodiments, a core region has a pattern of backbone chiral centers comprising (Sp)t(Rp)n(Sp)m. In some embodiments, a core region has a pattern of backbone chiral centers comprising (Sp)t(Rp)n(Sp)m, wherein m>2 and n is 1. In some embodiments, a core region has a pattern of backbone chiral centers comprising (Sp)t(Rp)n(Sp)m, wherein t>2, m>2 and n is 1. Among other things, the present disclosure demonstrates that, in some embodiments, such patterns can provide and/or enhance controlled cleavage, improved cleavage rate, selectivity, etc., of a target sequence, e.g., an RNA sequence. Example patterns of backbone chiral centers are described in the present disclosure.

[0948] In some embodiments, at least 60% of the chiral internucleotidic linkages in the core region are Sp. In some embodiments, at least 65% of the chiral internucleotidic linkages in the core region are Sp. In some embodiments, at least 66% of the chiral internucleotidic linkages in the core region are Sp. In some embodiments, at least 67% of the chiral internucleotidic linkages in the core region are Sp. In some embodiments, at least 70% of the chiral internucleotidic linkages in the core region are Sp. In some embodiments, at least 75% of the chiral internucleotidic linkages in the core region are Sp. In some embodiments, at least 80% of the chiral internucleotidic linkages in the core region are Sp. In some embodiments, at least 85% of the chiral internucleotidic linkages in the core region are Sp. In some embodiments, at least 90% of the chiral internucleotidic linkages in the core region are Sp. In some embodiments, at least 95% of the chiral internucleotidic linkages in the core region are Sp. In some embodiments, each chiral internucleotidic linkages in the core region is Sp.

[0949] In some embodiments, at least 1 core region internucleotidic linkage is Sp. In some embodiments, at least 2 core region internucleotidic linkages are Sp. In some embodiments, at least 3 core region internucleotidic linkages are Sp. In some embodiments, at least 4 core region internucleotidic linkages are Sp. In some embodiments, at least 5 core region internucleotidic linkages are Sp. In some embodiments, at least 6 core region internucleotidic linkages are Sp. In some embodiments, at least 7 core region internucleotidic linkages are Sp. In some embodiments, at least 8 core region internucleotidic linkages are Sp. In some embodiments, at least 9 core region internucleotidic linkages are Sp. In some embodiments, at least 10 core region internucleotidic linkages are Sp. In some embodiments, at least 11 core region internucleotidic linkages are Sp. In some embodiments, at least 12 core region internucleotidic linkages are Sp. In some embodiments, at least 13 core region internucleotidic linkages are Sp. In some embodiments, at least 14 core region internucleotidic linkages are Sp. In some embodiments, at least 15 core region internucleotidic linkages are Sp. In some embodiments, at least 16 core region internucleotidic linkages are Sp. In some embodiments, at least 17 core region internucleotidic linkages are Sp. In some embodiments, at least 18 core region internucleotidic linkages are Sp. In some embodiments, at least 19 core region internucleotidic linkages are Sp. In some embodiments, at least 20 core region internucleotidic linkages are Sp. In some embodiments, at least 21 core region internucleotidic linkages are Sp. In some embodiments, at least two core region internucleotidic linkages are Sp. In some embodiments, the Sp internucleotidic linkages are consecutive.

[0950] In some embodiments, at least 60% of the chiral internucleotidic linkages in the core region are Rp. In some embodiments, at least 65% of the chiral internucleotidic linkages in the core region are Rp. In some embodiments, at least 66% of the chiral internucleotidic linkages in the core region are Rp. In some embodiments, at least 67% of the chiral internucleotidic linkages in the core region are Rp. In some embodiments, at least 70% of the chiral internucleotidic linkages in the core region are Rp. In some embodiments, at least 75% of the chiral internucleotidic linkages in the core region are Rp. In some embodiments, at least 80% of the chiral internucleotidic linkages in the core region are Rp. In some embodiments, at least 85% of the chiral internucleotidic linkages in the core region are Rp. In some emIn some embodiments, each chiral internucleotidic linkages in the core region is Rp.

[0951] In some embodiments, at least 1 core region internucleotidic linkage is Rp. In some embodiments, at least 2 core region internucleotidic linkages are Rp. In some embodiments, at least 3 core region internucleotidic linkages are Rp. In some embodiments, at least 4 core region internucleotidic linkages are Rp. In some embodiments, at least 5 core region internucleotidic linkages are Rp. In some embodiments, at least 6 core region internucleotidic linkages are Rp. In some embodiments, at least 7 core region internucleotidic linkages are Rp. In some embodiments, at least 8 core region internucleotidic linkages are Rp. In some embodiments, at least 9 core region internucleotidic linkages are Rp. In some embodiments, at least 10 core region internucleotidic linkages are Rp. In some embodiments, at least 11 core region internucleotidic linkages are Rp. In some embodiments, at least 12 core region internucleotidic linkages are Rp. In some embodiments, at least 13 core region internucleotidic linkages are Rp. In some embodiments, at least 14 core region internucleotidic linkages are Rp. In some embodiments, at least 15 core region internucleotidic linkages are Rp. In some embodiments, at least 16 core region internucleotidic linkages are Rp. In some embodiments, at least 17 core region internucleotidic linkages are Rp. In some embodiments, at least 18 core region internucleotidic linkages are Rp. In some embodiments, at least 19 core region internucleotidic linkages are Rp. In some embodiments, at least 20 core region internucleotidic linkages are Rp. In some embodiments, at least 21 core region internucleotidic linkages are Rp. In some embodiments, at least two core region internucleotidic linkages are Rp. In some embodiments, the Rp internucleotidic linkages are consecutive.

[0952] In some embodiments, a core comprises one or more modified sugar moieties. In some embodiments, a core comprises two or more modified sugar moieties. In some embodiments, a core comprises three or more modified sugar moieties. In some embodiments, a core comprises four or more modified sugar moieties. In some embodiments, a core comprises five or more modified sugar moieties. In some embodiments, a core comprises six or more modified sugar moieties. In some embodiments, a core comprises seven or more modified sugar moieties. In some embodiments, a core comprises eight or more modified sugar moieties. In some embodiments, a core comprises nine or more modified sugar moieties. In some embodiments, a core comprises ten or more modified sugar moieties. In some embodiments, a core comprises 11 or more modified sugar moieties. In some embodiments, a core comprises 12 or more modified sugar moieties. In some embodiments, a core comprises 13 or more modified sugar moieties. In some embodiments, a core comprises 14 or more modified sugar moieties. In some embodiments, a core comprises 15 or more modified sugar moieties. In some embodiments, a core comprises 16 or more modified sugar moieties. In some embodiments, a core comprises 17 or more modified sugar moieties. In some embodiments, a core comprises 18 or more modified sugar moieties. In some embodiments, a core comprises 19 or more modified sugar moieties. In some embodiments, a core comprises 20 or more modified sugar moieties. In some embodiments, a core comprises 21 or more modified sugar moieties. In some embodiments, a core comprises 22 or more modified sugar moieties. In some embodiments, a core comprises 23 or more modified sugar moieties. In some embodiments, a core comprises 24 or more modified sugar moieties. In some embodiments, a core comprises 25 or more modified sugar moieties. In some embodiments, a core comprises 30 or more modified sugar moieties. In some embodiments, a core comprises 35 or more modified sugar moieties. In some embodiments, a 2′-modification is 2′-OR¹. In some embodiments, a 2′-modification is 2′-OMe.

[0953] In some embodiments, a core comprises one or more 2′-modified sugar moieties. In some embodiments, a core comprises two or more 2′-modified sugar moieties. In some embodiments, a core comprises three or more 2′-modified sugar moieties. In some embodiments, a core comprises four or more 2′-modified sugar moieties. In some embodiments, a core comprises five or more 2′-modified sugar moieties. In some embodiments, a core comprises six or more 2′-modified sugar moieties. In some embodiments, a core comprises seven or more 2′-modified sugar moieties. In some embodiments, a core comprises eight or more 2′-modified sugar moieties. In some embodiments, a core comprises nine or more 2′-modified sugar moieties. In some embodiments, a core comprises ten or more 2′-modified sugar moieties. In some embodiments, a core comprises 11 or more 2′-modified sugar moieties. In some embodiments, a core comprises 12 or more 2′-modified sugar moieties. In some embodiments, a core comprises 13 or more 2′-modified sugar moieties. In some embodiments, a core comprises 14 or more 2′-modified sugar moieties. In some embodiments, a core comprises 15 or more 2′-modified sugar moieties. In some embodiments, a core comprises 16 or more 2′-modified sugar moieties. In some embodiments, a core comprises 17 or more 2′-modified sugar moieties. In some embodiments, a core comprises 18 or more 2′-modified sugar moieties. In some embodiments, a core comprises 19 or more 2′-modified sugar moieties. In some embodiments, a core comprises 20 or more 2′-modified sugar moieties. In some embodiments, a core comprises 21 or more 2′-modified sugar moieties. In some embodiments, a core comprises 22 or more 2′-modified sugar moieties. In some embodiments, a core comprises 23 or more 2′-modified sugar moieties. In some embodiments, a core comprises 24 or more 2′-modified sugar moieties. In some embodiments, a core comprises 25 or more 2′-modified sugar moieties. In some embodiments, a core comprises 30 or more 2′-modified sugar moieties. In some embodiments, a core comprises 35 or more 2′-modified sugar moieties. In some embodiments, a 2′-modification is 2′-OR¹. In some embodiments, a 2′-modification is 2′-OMe.

[0954] In some embodiments, a wing-core-wing (i.e., X—Y—X) motif is represented numerically as, e.g., 5-10-4, meaning the wing to the 5′-end of the core is 5 bases in length, the core region is 10 bases in length, and the wing region to the 3′-end of the core is 4-bases in length. In some embodiments, a wing-core-wing motif is any of, e.g. 2-16-2, 3-14-3, 4-12-4, 5-10-5, 2-9-6, 3-9-3, 3-9-4, 3-9-5, 4-7-4, 4-9-3, 4-9-4, 4-9-5, 4-10-5, 4-11-4, 4-11-5, 5- 7-5, 5-8-6, 8-7-5, 7-7-6, 5-9-3, 5-9-5, 5-10-4, 5-10-5, 6-7-6, 6-8-5, and 6-9-2, etc. In certain embodiments, a wing-core-wing motif is 5-10-5. In certain embodiments, a wing-core-wing motif is 7-7-6. In certain embodiments, a wing-core-wing motif is 8-7-5.

[0955] In some embodiments, a wing-core motif is 5-15, 6-14, 7-13, 8-12, 9-12, etc. In some embodiments, a core-wing motif is 5-15, 6-14, 7-13, 8-12, 9-12, etc.

[0956] In some embodiments, the internucleosidic linkages of provided oligonucleotides of such wing-core-wing (i.e., X—Y—X) motifs are all chiral, modified phosphate linkages. In some embodiments, the internucleosidic linkages of provided oligonucleotides of such wing-core-wing (i.e., X—Y—X) motifs are all chiral phosphorothioate internucleotidic linkages. In some embodiments, chiral internucleotidic linkages of provided oligonucleotides of such wing-core-wing motifs are at least about 10, 20, 30, 40, 50, 50, 70, 80, or 90% chiral, modified phosphate internucleotidic linkages. In some embodiments, chiral internucleotidic linkages of provided oligonucleotides of such wing-core-wing motifs are at least about 10, 20, 30, 40, 50, 60, 70, 80, or 90% chiral phosphorothioate internucleotidic linkages. In some embodiments, chiral internucleotidic linkages of provided oligonucleotides of such wing-core-wing motifs are at least about 10, 20, 30, 40, 50, 50, 70, 80, or 90% chiral phosphorothioate internucleotidic linkages of the Sp conformation.

[0957] In some embodiments, each wing region of a wing-core-wing motif optionally contains chiral, modified phosphate internucleotidic linkages. In some embodiments, each wing region of a wing-core-wing motif optionally contains chiral phosphorothioate internucleotidic linkages. In some embodiments, each wing region of a wing-core-wing motif contains chiral phosphorothioate internucleotidic linkages. In some embodiments, the two wing regions of a wing-core-wing motif have the same internucleotidic linkage stereochemistry. In some embodiments, the two wing regions have different internucleotidic linkage stereochemistry. In some embodiments, each internucleotidic linkage in the wings is independently a chiral internucleotidic linkage.

[0958] In some embodiments, the core region of a wing-core-wing motif optionally contains chiral, modified phosphate internucleotidic linkages. In some embodiments, the core region of a wing-core-wing motif optionally contains chiral phosphorothioate internucleotidic linkages. In some embodiments, the core region of a wing-core-wing motif comprises a repeating pattern of internucleotidic linkage stereochemistry. In some embodiments, the core region of a wing-core-wing motif has a repeating pattern of internucleotidic linkage stereochemistry. In some embodiments, the core region of a wing-core-wing motif comprises repeating pattern of internucleotidic linkage stereochemistry, wherein the repeating pattern is (Sp)mRp or Rp(Sp)m, wherein in is 1-50. In some embodiments, the core region of a wing-core-wing motif comprises repeating pattern of internucleotidic linkage stereochemistry, wherein the repeating pattern is (Sp)mRp or Rp(Sp)m, wherein m is 1-50. In some embodiments, the core region of a wing-core-wing motif comprises repeating pattern of internucleotidic linkage stereochemistry, wherein the repeating pattern is (Sp)mRp, wherein m is 1-50. In some embodiments, the core region of a wing-core-wing motif comprises repeating pattern of internucleotidic linkage stereochemistry, wherein the repeating pattern is Rp(Sp)m, wherein m is 1-50. In some embodiments, the core region of a wing-core-wing motif has repeating pattern of internucleotidic linkage stereochemistry, wherein the repeating pattern is (Sp)mRp or Rp(Sp)m, wherein m is 1-50. In some embodiments, the core region of a wing-core-wing motif has repeating pattern of internucleotidic linkage stereochemistry, wherein the repeating pattern is (Sp)mRp, wherein m is 1-50. In some embodiments, the core region of a wing-core-wing motif has repeating pattern of internucleotidic linkage stereochemistry, wherein the repeating pattern is Rp(Sp)m, wherein m is 1-50. In some embodiments, the core region of a wing-core-wing motif has repeating pattern of internucleotidic linkage stereochemistry, wherein the repeating pattern is a motif comprising at least 33% of internucleotidic linkage in the S conformation. In some embodiments, the core region of a wing-core-wing motif has repeating pattern of internucleotidic linkage stereochemistry, wherein the repeating pattern is a motif comprising at least 50% of internucleotidic linkage in the S conformation. In some embodiments, the core region of a wing-core-wing motif has repeating pattern of internucleotidic linkage stereochemistry, wherein the repeating pattern is a motif comprising at least 66% of internucleotidic linkage in the S conformation. In some embodiments, the core region of a wing-core-wing motif has repeating pattern of internucleotidic linkage stereochemistry, wherein the repeating pattern is a repeating triplet motif selected from RpRpSp and SpSpRp. In some embodiments, the core region of a wing-core-wing motif has repeating pattern of internucleotidic linkage stereochemistry, wherein the repeating pattern is a repeating RpRpSp. In some embodiments, the core region of a wing-core-wing motif has repeating pattern of internucleotidic linkage stereochemistry, wherein the repeating pattern is a repeating SpSpRp.

[0959] In some embodiments, the present disclosure provides a chirally controlled oligonucleotide composition of an oligonucleotide type whose pattern of backbone chiral centers in the core region comprises (Sp)mRp or Rp(Sp)m. In some embodiments, the present disclosure provides a chirally controlled oligonucleotide composition of an oligonucleotide type whose pattern of backbone chiral centers in the core region comprises Rp(Sp)m. In some embodiments, the present disclosure provides a chirally controlled oligonucleotide composition of an oligonucleotide type whose pattern of backbone chiral centers in the core region comprises (Sp)mRp. In some embodiments, m is 2. In some embodiments, the present disclosure provides a chirally controlled oligonucleotide composition of an oligonucleotide type whose pattern of backbone chiral centers in the core region comprises Rp(Sp)₂. In some embodiments, the present disclosure provides a chirally controlled oligonucleotide composition of an oligonucleotide type whose pattern of backbone chiral centers in the core region comprises (Sp)₂Rp(Sp)₂. In some embodiments, the present disclosure provides a chirally controlled oligonucleotide composition of an oligonucleotide type whose pattern of backbone chiral centers in the core region comprises (Rp)₂Rp(SpP)₂. In some embodiments, the present disclosure provides a chirally controlled oligonucleotide composition of an oligonucleotide type whose pattern of backbone chiral centers in the core region comprises RpSpRp(Sp). In some embodiments, the present disclosure provides a chirally controlled oligonucleotide composition of an oligonucleotide type whose pattern of backbone chiral centers in the core region comprises SpRpRp(Sp)₂. In some embodiments, the present disclosure provides a chirally controlled oligonucleotide composition of an oligonucleotide type whose pattern of backbone chiral centers in the core region comprises (Sp)₂Rp.

[0960] In some embodiments, the present disclosure provides a chirally controlled oligonucleotide composition of an oligonucleotide type whose pattern of backbone chiral centers comprises (Sp)mRp or Rp(Sp)m. In some embodiments, the present disclosure provides a chirally controlled oligonucleotide composition of an oligonucleotide type whose pattern of backbone chiral centers comprises Rp(Sp)m. In some embodiments, the present disclosure provides a chirally controlled oligonucleotide composition of an oligonucleotide type whose pattern of backbone chiral centers comprises (Sp)mRp. In some embodiments, m is 2. In some embodiments, the present disclosure provides a chirally controlled oligonucleotide composition of an oligonucleotide type whose pattern of backbone chiral centers comprises Rp(Sp)₂. In some embodiments, the present disclosure provides a chirally controlled oligonucleotide composition of an oligonucleotide type whose pattern of backbone chiral centers comprises (p)₂Rp(Sp)₂. In some embodiments, the present disclosure provides a chirally controlled oligonucleotide composition of an oligonucleotide type whose pattern of backbone chiral centers comprises (Rp)₂Rp(Sp)₂. In some embodiments, the present disclosure provides a chirally controlled oligonucleotide composition of an oligonucleotide type whose pattern of backbone chiral centers comprises RpSpRp(Sp)₂. In some embodiments, the present disclosure provides a chirally controlled oligonucleotide composition of an oligonucleotide type whose pattern of backbone chiral centers comprises SpRpRp(Sp)₂. In some embodiments, the present disclosure provides a chirally controlled oligonucleotide composition of an oligonucleotide type whose pattern of backbone chiral centers comprises (Sp)₂Rp.

[0961] As defined herein, m is 1-50. In some embodiments, m is 1. In some embodiments, m is 2-50. In some embodiments, m is 2, 3, 4, 5, 6, 7 or 8. In some embodiments, m is 3, 4, 5, 6, 7 or 8. In some embodiments, m is 4, 5, 6, 7 or 8. In some embodiments, m is 5, 6, 7 or 8. In some embodiments, m is 6, 7 or 8. In some embodiments, m is 7 or 8. In some embodiments, m is 2. In some embodiments, m is 3. In some embodiments, m is 4. In some embodiments, m is 5. In some embodiments, m is 6. In some embodiments, m is 7. In some embodiments, m is 8. In some embodiments, m is 9. In some embodiments, m is 10. In some embodiments, m is 11. In some embodiments, m is 12. In some embodiments, m is 13. In some embodiments, m is 14. In some embodiments, m is 15. In some embodiments, m is 16. In some embodiments, in is 17. In some embodiments, m is 18. In some embodiments, n is 19. In some embodiments, in is 20. In some embodiments, m is 21. In some embodiments, m is 22. In some embodiments, m is 23. In some embodiments, m is 24. In some embodiments, m is 25. In some embodiments, m is greater than 25.

[0962] In some embodiments, a repeating pattern is (Sp)m(Rp)n, wherein n is 1-10, and m is independently as defined above and described herein. In some embodiments, the present disclosure provides a chirally controlled oligonucleotide composition of an oligonucleotide type whose pattern of backbone chiral centers comprises (Sp)m(Rp)n. In some embodiments, the present disclosure provides a chirally controlled oligonucleotide composition of an oligonucleotide type whose pattern of backbone chiral centers in the core region comprises (Sp)m(Rp)n. In some embodiments, a repeating pattern is (Rp)n(Sp)m, wherein n is 1-10, and m is independently as defined above and described herein. In some embodiments, the present disclosure provides a chirally controlled oligonucleotide composition of an oligonucleotide type whose pattern of backbone chiral centers comprises (Rp)n(Sp)m. In some embodiments, the present disclosure provides a chirally controlled oligonucleotide composition of an oligonucleotide type whose pattern of backbone chiral centers in the core region comprises (Rp)n(Sp)m. In some embodiments, (Rp)n(Sp)m is (Rp)(Sp)₂. In some embodiments, (Sp)n(Rp)m is (Sp)₂(Rp).

[0963] In some embodiments, the present disclosure provides a chirally controlled oligonucleotide composition of an oligonucleotide type whose pattern of backbone chiral centers comprises (Sp)m(Rp)n(Sp)t. In some embodiments, a repeating pattern is (Sp)m(Rp)n(Sp)t, wherein n is 1-10, t is 1-50, and m is as defined above and described herein. In some embodiments, the present disclosure provides a chirally controlled oligonucleotide composition of an oligonucleotide type whose pattern of backbone chiral centers in the core region comprises (Sp)m(Rp)n(Sp)t. In some embodiments, a repeating pattern is (Sp)t(Rp)n(Sp)m, wherein n is 1-10, t is 1-50, and m is as defined above and described herein. In some embodiments, the present disclosure provides a chirally controlled oligonucleotide composition of an oligonucleotide type whose pattern of backbone chiral centers comprises (Sp)t(Rp)n(Sp)m. In some embodiments, the present disclosure provides a chirally controlled oligonucleotide composition of an oligonucleotide type whose pattern of backbone chiral centers in the core region comprises (Sp)t(Rp)n(Sp)m.

[0964] In some embodiments, a repeating pattern is (Np)t(Rp)n(Sp)m, wherein n is 1-10, t is 1-50, Np is independently Rp or Sp, and m is as defined above and described herein. In some embodiments, the present disclosure provides a chirally controlled oligonucleotide composition of an oligonucleotide type whose pattern of backbone chiral centers comprises (Np)t(Rp)n(Sp)m. In some embodiments, the present disclosure provides a chirally controlled oligonucleotide composition of an oligonucleotide type whose pattern of backbone chiral centers in the core region comprises (Np)t(Rp)n(Sp)m. In some embodiments, a repeating pattern is (Np)m(Rp)n(Sp)t, wherein n is 1-10, t is 1-50, Np is independently Rp or Sp, and m is as defined above and described herein. In some embodiments, the present disclosure provides a chirally controlled oligonucleotide composition of an oligonucleotide type whose pattern of backbone chiral centers comprises (Np)m(Rp)n(Sp)t. In some embodiments, the present disclosure provides a chirally controlled oligonucleotide composition of an oligonucleotide type whose pattern of backbone chiral centers in the core region comprises (Np)m(Rp)n(Sp)t. In some embodiments, Np is Rp. In some embodiments, Np is Sp. In some embodiments, all Np are the same. In some embodiments, all Np are Sp. In some embodiments, at least one Np is different from the other Np. In some embodiments, t is 2.

[0965] As defined herein, n is 1-10. In some embodiments, n is 1, 2, 3, 4, 5, 6, 7 or 8. In some embodiments, n is 1. In some embodiments, n is 2, 3, 4, 5, 6, 7 or 8. In some embodiments, n is 3, 4, 5, 6, 7 or 8. In some embodiments, n is 4, 5, 6, 7 or 8. In some embodiments, n is 5, 6, 7 or 8. In some embodiments, n is 6, 7 or 8. In some embodiments, n is 7 or 8. In some embodiments, n is 1. In some embodiments, n is 2. In some embodiments, n is 3. In some embodiments, n is 4. In some embodiments, n is 5. In some embodiments, n is 6. In some embodiments, n is 7. In some embodiments, n is 8. In some embodiments, n is 9. In some embodiments, n is 10.

[0966] As defined herein, t is 1-50. In some embodiments, t is 1. In some embodiments, t is 2-50. In some embodiments, t is 2, 3, 4, 5, 6, 7 or 8. In some embodiments, t is 3, 4, 5, 6, 7 or 8. In some embodiments, t is 4, 5, 6, 7 or 8. In some embodiments, t is 5, 6, 7 or 8. In some embodiments, t is 6, 7 or 8. In some embodiments, t is 7 or 8. In some embodiments, t is 2. In some embodiments, t is 3. In some embodiments, t is 4. In some embodiments, t is 5. In some embodiments, t is 6. In some embodiments, t is 7. In some embodiments, t is 8. In some embodiments, t is 9. In some embodiments, t is 10. In some embodiments, t is 11. In some embodiments, t is 12. In some embodiments, t is 13. In some embodiments, t is 14. In some embodiments, t is 15. In some embodiments, t is 16. In some embodiments, t is 17. In some embodiments, t is 18. In some embodiments, t is 19. In some embodiments, t is 20. In some embodiments, t is 21. In some embodiments, t is 22. In some embodiments, t is 23. In some embodiments, t is 24. In some embodiments, t is 25. In some embodiments, t is greater than 25.

[0967] In some embodiments, at least one of m and t is greater than 2. In some embodiments, at least one of m and t is greater than 3. In some embodiments, at least one of m and t is greater than 4. In some embodiments, at least one of m and t is greater than 5. In some embodiments, at least one of m and t is greater than 6. In some embodiments, at least one of n and t is greater than 7. In some embodiments, at least one of m and t is greater than 8. In some embodiments, at least one of m and t is greater than 9. In some embodiments, at least one of in and t is greater than 10. In some embodiments, at least one of m and t is greater than 11. In some embodiments, at least one of m and t is greater than 12. In some embodiments, at least one of m and t is greater than 13. In some embodiments, at least one of m and t is greater than 14. In some embodiments, at least one of m and t is greater than 15. In some embodiments, at least one of m and t is greater than 16. In some embodiments, at least one of m and t is greater than 17. In some embodiments, at least one of m and t is greater than 18. In some embodiments, at least one of m and t is greater than 19. In some embodiments, at least one of m and t is greater than 20. In some embodiments, at least one of m and t is greater than 21. In some embodiments, at least one of m and t is greater than 22. In some embodiments, at least one of m and t is greater than 23. In some embodiments, at least one of m and t is greater than 24. In some embodiments, at least one of m and t is greater than 25.

[0968] In some embodiments, each one of m and t is greater than 2. In some embodiments, each one of m and t is greater than 3. In some embodiments, each one of m and t is greater than 4. In some embodiments, each one of m and t is greater than 5. In some embodiments, each one of m and t is greater than 6. In some embodiments, each one of m and t is greater than 7. In some embodiments, each one of m and t is greater than 8. In some embodiments, each one of m and t is greater than 9. In some embodiments, each one of m and t is greater than 10. In some embodiments, each one of m and t is greater than 11. In some embodiments, each one of in and t is greater than 12. In some embodiments, each one of m and t is greater than 13. In some embodiments, each one of m and t is greater than 14. In some embodiments, each one of m and t is greater than 15 In some embodiments, each one of m and t is greater than 16. In some embodiments, each one of m and t is greater than 17. In some embodiments, each one of m and t is greater than 18. In some embodiments, each one of m and t is greater than 19. In some embodiments, each one of m and t is greater than 20.

[0969] In some embodiments, the sum of m and t is greater than 3. In some embodiments, the sum of m and t is greater than 4. In some embodiments, the sum of in and t is greater than 5. In some embodiments, the sum of m and t is greater than 6. In some embodiments, the sum of in and t is greater than 7. In some embodiments, the sum of m and t is greater than 8. In some embodiments, the sum of m and t is greater than 9. In some embodiments, the sum of m and t is greater than 10. In some embodiments, the sum of m and t is greater than 11. In some embodiments, the sum of m and t is greater than 12. In some embodiments, the sum of m and t is greater than 13. In some embodiments, the sum of m and t is greater than 14. In some embodiments, the sum of m and t is greater than 15. In some embodiments, the sum of m and t is greater than 16. In some embodiments, the sum of m and t is greater than 17. In some embodiments, the sum of in and t is greater than 18. In some embodiments, the sum of m and t is greater than 19. In some embodiments, the sum of m and t is greater than 20. In some embodiments, the sum of m and t is greater than 21. In some embodiments, the sum of m and t is greater than 22. In some embodiments, the sum of m and t is greater than 23. In some embodiments, the sum of m and t is greater than 24. In some embodiments, the sum of m and t is greater than 25.

[0970] In some embodiments, n is 1, and at least one of m and t is greater than 1. In some embodiments, n is 1 and each of m and t is independently greater than 1. In some embodiments, m>n and t>n. In some embodiments, (Sp)m(Rp)n(Sp)t is (Sp)₂Rp(Sp)₂. In some embodiments, (Sp)t(Rp)n(Sp)m is (Sp)₂Rp(Sp)₂. In some embodiments, (Sp)t(Rp)n(Sp)m is SpRp(Sp)₂. In some embodiments, (Np)t(Rp)n(Sp)m is (Np)tRp(Sp)m. In some embodiments, (Np)t(Rp)n(Sp)m is (Np)₂Rp(Sp)m. In some embodiments, (Np)t(Rp)n(Sp)m is (Rp)₂Rp(Sp)m. In some embodiments, (Np)t(Rp)n(Sp)m is (Sp)₂Rp(Sp)m. In some embodiments, (Np)t(Rp)n(Sp)m is RpSpRp(Sp)m. In some embodiments, (Np)t(Rp)n(Sp)m is SpRpRp(Sp)m.

[0971] In some embodiments, (Sp)t(Rp)n(Sp)m is SpRpSpSp. In some embodiments, (Sp)t(Rp)n(Sp)m is (Sp)₂Rp(Sp)₂. In some embodiments, (Sp)t(Rp)n(Sp)m is (Sp)₃Rp(Sp)₃. In some embodiments, (Sp)t(Rp)n(Sp)m is (Sp)₄Rp(Sp)₄. In some embodiments, (Sp)t(Rp)n(Sp)m is (Sp)tRp(Sp)₅. In some embodiments, (Sp)t(Rp)n(Sp)m is SpRp(Sp)₅. In some embodiments, (Sp)t(Rp)n(Sp)m is (Sp)₂Rp(Sp)₅. In some embodiments, (Sp)t(Rp)n(Sp)m is (Sp)₃Rp(Sp)₅. In some embodiments, (Sp)t(Rp)n(Sp)m is (Sp)₄Rp(Sp)₅. In some embodiments, (Sp)t(Rp)n(Sp)m is (Sp)₅Rp(Sp)₅.

[0972] In some embodiments, (Sp)m(Rp)n(Sp)t is (Sp)₂Rp(Sp)₂. In some embodiments, (Sp)m(Rp)n(Sp)t is (Sp)₃Rp(Sp)₃. In some embodiments, (Sp)m(Rp)n(Sp)t is (Sp)₄Rp(Sp)₄. In some embodiments, (Sp)m(Rp)n(Sp)t is (Sp)mRp(Sp)₅. In some embodiments, (Sp)m(Rp)n(Sp)t is (Sp)₂Rp(Sp)₅. In some embodiments, (Sp)m(Rp)n(Sp)t is (Sp)₃Rp(Sp)₅. In some embodiments, (Sp)m(Rp)n(Sp)t is (Sp)₄Rp(Sp)₅. In some embodiments, (Sp)m(Rp)n(Sp)t is (Sp)₅Rp(Sp)₅.

[0973] In some embodiments, a core region comprises at least one Rp internucleotidic linkage. In some embodiments, a core region of a wing-core-wing motif comprises at least one Rp internucleotidic linkage. In some embodiments, a core region comprises at least one Rp phosphorothioate internucleotidic linkage. In some embodiments, a core region of a wing-core-wing motif comprises at least one Rp phosphorothioate internucleotidic linkage. In some embodiments, a core region of a wing-core-wing motif comprises only one Rp phosphorothioate internucleotidic linkage. In some embodiments, a core region motif comprises at least two Rp internucleotidic linkages. In some embodiments, a core region of a wing-core-wing motif comprises at least two Rp internucleotidic linkages. In some embodiments, a core region of a wing-core-wing motif comprises at least two Rp phosphorothioate internucleotidic linkages. In some embodiments, a core region comprises at least three Rp internucleotidic linkages. In some embodiments, a core region of a wing-core-wing motif comprises at least three Rp internucleotidic linkages. In some embodiments, a core region comprises at least three Rp phosphorothioate internucleotidic linkages. In some embodiments, a core region of a wing-core-wing motif comprises at least three Rp phosphorothioate internucleotidic linkages. In some embodiments, a core region comprises at least 4, 5, 6, 7, 8, 9, or 10 Rp internucleotidic linkages. In some embodiments, a core region of a wing-core-wing motif comprises at least 4, 5, 6, 7, 8, 9, or 10 Rp internucleotidic linkages. In some embodiments, a core region comprises at least 4, 5, 6, 7, 8, 9, or 10 Rp phosphorothioate internucleotidic linkages. In some embodiments, a core region of a wing-core-wing motif comprises at least 4, 5, 6, 7, 8, 9, or 10 Rp phosphorothioate internucleotidic linkages.

[0974] In some embodiments, a wing region comprises 2′-modifications of sugar moieties that differ from a core region. In some embodiments, a wing region comprises the same type of 2′-modifications that differ from a core region. In some embodiments, a wing region comprises 2′-F which is absent from a core region. In some embodiments, a wing region comprises a pattern of 2′-F which is absent from a core region. In some embodiments, a wing region comprises a level of 2′-F which differs from a core region. In some embodiments, a level is absolute as measured by the number of 2′-F modifications. In some embodiments, a level is relative as measured by the percentage of 2′-F modifications. In some embodiments, a wing region differs from a core region in that it contains less of a 2′-modification presented in a core region, as measured by the number and/or percentage of such 2′-modifications. In some embodiments, a wing region contains less of a 2′-OR¹ modification in a core region. In some embodiments, a wing region contains less of a 2′-OMe modification in a core region. In some embodiments, a wing region differs from a core region in that it contains less of unmodified sugar moieties presented in a core region, as measured by the number and/or percentage of such 2′-modifications.

[0975] In some embodiments, provided oligonucleotides comprise two or more wing regions and a core region, for example, provided oligonucleotides may comprise a wing-core-wing structure. In some embodiments, each wing region comprises 2′-modifications of sugar moieties that differ from a core region. In some embodiments, each wing region comprises the same type of 2′-modifications that differ from a core region. In some embodiments, each wing region comprises 2′-F which is absent from a core region. In some embodiments, each wing region comprises a pattern of 2′-F which is absent from a core region. In some embodiments, each wing region comprises a level of 2′-F which differs from a core region. In some embodiments, a level is absolute as measured by the number of 2′-F modifications. In some embodiments, a level is relative as measured by the percentage of 2′-F modifications. In some embodiments, each wing region differs from a core region in that it contains less of a 2′-modification presented in a core region, as measured by the number and/or percentage of such 2′-modifications. In some embodiments, each wing region contains less of a 2′-OR¹ modification in a core region. In some embodiments, each wing region contains less of a 2′-OMe modification in a core region. In some embodiments, each wing region differs from a core region in that it contains less of unmodified sugar moieties presented in a core region, as measured by the number and/or percentage of such 2′-modifications.

[0976] In certain embodiments, a wing-core-wing motif is a 5-10-5 motif wherein the residues at each wing region are 2′-modified residues. In certain embodiments, a wing-core-wing motif is a 5-10-5 motif wherein the residues at each wing region are 2′-OR¹-modified residues. In certain embodiments, a wing-core-wing motif is a 5-10-5 motif wherein the residues at each wing region are 2′-MOE-modified residues. In certain embodiments, a wing-core-wing motif is a 5-10-5 motif wherein the residues at each wing region are 2′-OMe-modified residues. In certain embodiments, a wing-core-wing motif is a 5-10-5 motif wherein the residues at each wing region are 2′-F-modified residues. In certain embodiments, a wing-core-wing motif is a 5-10-5 motif wherein the residues in the core region are 2′-deoxyribonucleoside residues. In certain embodiments, a wing-core-wing motif is a 5-10-5 motif, wherein all internucleotidic linkages are phosphorothioate linkages. In certain embodiments, a wing-core-wing motif is a 5-10-5 motif, wherein all internucleotidic linkages are chiral phosphorothioate linkages. In certain embodiments, a wing-core-wing motif is a 5-10-5 motif wherein the residues at each wing region are 2′-modified residues, the residues in the core region are 2′-deoxyribonucleoside residues, and all internucleotidic linkages in the core region are chiral phosphorothioate linkages. In certain embodiments, a wing-core-wing motif is a 5-10-5 motif wherein the residues at each wing region are 2′-OR¹-modified residues, the residues in the core region are 2′-deoxyribonucleoside residues, and all internucleotidic linkages in the core region are chiral phosphorothioate linkages. In certain embodiments, a wing-core-wing motif is a 5-10-5 motif wherein the residues at each wing region are 2′-MOE-modified residues, the residues in the core region are 2′-deoxyribonucleoside residues, and all internucleotidic linkages in the core region are chiral phosphorothioate linkages. In certain embodiments, a wing-core-wing motif is a 5-10-5 motif wherein the residues at each wing region are 2′-OMe-modified residues, the residues in the core region are 2′-deoxyribonucleoside residues, and all internucleotidic linkages in the core region are chiral phosphorothioate linkages.

[0977] In some embodiments, residues at the “X” wing region are not 2′-MOE-modified residues. In certain embodiments, a wing-core motif is a motif wherein the residues at the “X” wing region are not 2′-MOE-modified residues. In certain embodiments, a core-wing motif is a motif wherein the residues at the “X” wing region are not 2′-MOE-modified residues. In certain embodiments, a wing-core-wing motif is a motif wherein the residues at each “X” wing region are not 2′-MOE-modified residues. In certain embodiments, a wing-core-wing motif is a 5-10-5 motif wherein the residues at each “X” wing region are not 2′-MOE-modified residues. In certain embodiments, a wing-core-wing motif is a 5-10-5 motif wherein the residues in the core “Y” region are 2′-deoxyribonucleoside residues. In certain embodiments, a wing-core-wing motif is a 5-10-5 motif, wherein all internucleotidic linkages are phosphorothioate internucleotidic linkages. In certain embodiments, a wing-core-wing motif is a 5-10-5 motif, wherein all internucleotidic linkages are chiral phosphorothioate internucleotidic linkages. In certain embodiments, a wing-core-wing motif is a 5-10-5 motif wherein the residues at each “X” wing region are not 2′-MOE-modified residues, the residues in the core “Y” region are 2′-deoxyribonucleoside, and all internucleotidic linkages are chiral phosphorothioate internucleotidic linkages.

[0978] In some embodiments, a chiral, modified phosphate linkage is a chiral phosphorothioate linkage, i.e., phosphorothioate internucleotidic linkage. In some embodiments, a core region comprises at least 5%, 10%, 15%, 20%, 25%, 30%, 35%, 40%, 45%, 50%, 55%, 60%, 65%, 70%, 75%, 80%, 85%, 90%, 95%, or 100% chiral phosphorothioate internucleotidic linkages. In some embodiments, all chiral, modified phosphate linkages are chiral phosphorothioate internucleotidic linkages. In some embodiments, at least about 10%, 20%, 30%, 40%, 50%, 60%, 70%, 80%, or 90% chiral phosphorothioate internucleotidic linkages of a core region are of the Sp conformation. In some embodiments, at least about 10% chiral phosphorothioate internucleotidic linkages of a core region are of the Sp conformation. In some embodiments, at least about 20% chiral phosphorothioate internucleotidic linkages of a core region are of the Sp conformation. In some embodiments, at least about 30% chiral phosphorothioate internucleotidic linkages of a core region are of the Sp conformation. In some embodiments, at least about 40% chiral phosphorothioate internucleotidic linkages of a core region are of the Sp conformation. In some embodiments, at least about 50% chiral phosphorothioate internucleotidic linkages of a core region are of the Sp conformation. In some embodiments, at least about 60% chiral phosphorothioate internucleotidic linkages of a core region are of the Sp conformation. In some embodiments, at least about 70% chiral phosphorothioate internucleotidic linkages of a core region are of the Sp conformation. In some embodiments, at least about 80% chiral phosphorothioate internucleotidic linkages of a core region are of the Sp conformation. In some embodiments, at least about 90% chiral phosphorothioate internucleotidic linkages of a core region are of the Sp conformation. In some embodiments, at least about 95% chiral phosphorothioate internucleotidic linkages of a core region are of the Sp conformation.

[0979] In some embodiments, at least about 10%, 20%, 30%, 40%, 50%, 60%, 70%, 80%, or 90% chiral phosphorothioate internucleotidic linkages of a core region are of the Rp conformation. In some embodiments, at least about 10% chiral phosphorothioate internucleotidic linkages of a core region are of the Rp conformation. In some embodiments, at least about 20% chiral phosphorothioate internucleotidic linkages of a core region are of the Rp conformation. In some embodiments, at least about 30% chiral phosphorothioate internucleotidic linkages of a core region are of the Rp conformation. In some embodiments, at least about 40% chiral phosphorothioate internucleotidic linkages of a core region are of the Rp conformation. In some embodiments, at least about 50% chiral phosphorothioate internucleotidic linkages of a core region are of the Rp conformation. In some embodiments, at least about 60% chiral phosphorothioate internucleotidic linkages of a core region are of the Rp conformation. In some embodiments, at least about 70% chiral phosphorothioate internucleotidic linkages of a core region are of the Rp conformation. In some embodiments, at least about 80% chiral phosphorothioate internucleotidic linkages of a core region are of the Rp conformation. In some embodiments, at least about 90% chiral phosphorothioate internucleotidic linkages of a core region are of the Rp conformation. In some embodiments, at least about 95% chiral phosphorothioate internucleotidic linkages of a core region are of the Rp conformation.

[0980] In some embodiments, less than about 10%, 20%, 30%, 40%, 50%, 60%, 70%, 80%, or 90% chiral phosphorothioate internucleotidic linkages of a core region are of the Rp conformation. In some embodiments, less than about 10% chiral phosphorothioate internucleotidic linkages of a core region are of the Rp conformation. In some embodiments, less than about 20% chiral phosphorothioate internucleotidic linkages of a core region are of the Rp conformation. In some embodiments, less than about 30% chiral phosphorothioate internucleotidic linkages of a core region are of the Rp conformation. In some embodiments, less than about 40% chiral phosphorothioate internucleotidic linkages of a core region are of the Rp conformation. In some embodiments, less than about 50% chiral phosphorothioate internucleotidic linkages of a core region are of the Rp conformation. In some embodiments, less than about 60% chiral phosphorothioate internucleotidic linkages of a core region are of the Rp conformation. In some embodiments, less than about 70% chiral phosphorothioate internucleotidic linkages of a core region are of the Rp conformation. In some embodiments, less than about 80% chiral phosphorothioate internucleotidic linkages of a core region are of the Rp conformation. In some embodiments, less than about 90% chiral phosphorothioate internucleotidic linkages of a core region are of the Rp conformation. In some embodiments, less than about 95% chiral phosphorothioate internucleotidic linkages of a core region are of the Rp conformation. In some embodiments, a core region has only one Rp chiral phosphorothioate internucleotidic linkages. In some embodiments, a core region has only one Rp chiral phosphorothioate internucleotidic linkages, wherein all internucleotide linkages are chiral phosphorothioate internucleotidic linkages.

[0981] In some embodiments, provided oligonucleotides are blockmers. In some embodiments, provided oligonucleotide are altmers. In some embodiments, provided oligonucleotides are altmers comprising alternating blocks. In some embodiments, a blockmer or an altmer can be defined by chemical modifications (including presence or absence), e.g., base modifications, sugar modification, internucleotidic linkage modifications, stereochemistry, etc. Example chemical modifications, stereochemistry and patterns thereof for a block and/or an alternating unit include but are not limited to those described in this disclosure, such as those described for a wing, a core, an oligonucleotide, etc. In some embodiments, a blockmer comprises a pattern of ..SS..RR..SS..RR.. In some embodiments, an altmer comprises a pattern of SRSRSRSR.

[0982] In some embodiments, a pattern of backbone chiral center, e.g., of a wing, a core, a block, comprises one or more (Rp)p(Sp)x(Rp)q(Sp)y, wherein each of p, x, q, y is independently 0-50, p+q>0, and x+y>0.

[0983] In some embodiments, a provided pattern of backbone chiral centers comprises repeating (Sp)m(Rp)n, (Rp)n(Sp)m, (Np)t(Rp)n(Sp)m, or (Sp)t(Rp)n(Sp)m units. In some embodiments, a repeating unit is (Sp)m(Rp)n. In some embodiments, a repeating unit is SpRp. In some embodiments, a repeating unit is SpSpRp. In some embodiments, a repeating unit is SpRpRp. In some embodiments, a repeating unit is RpRpSp. In some embodiments, a repeating unit is (Rp)n(Sp)m. In some embodiments, a repeating unit is (Np)t(Rp)n(Sp)m. In some embodiments, a repeating unit is (Sp)t(Rp)n(Sp)m.

[0984] In some embodiments, a provided pattern of backbone chiral centers comprises (Rp/Sp)x-(All Rp or All Sp)-(Rp/Sp)y. In some embodiments, a provided pattern of backbone chiral centers comprises (Rp/Sp)-(All Rp or All Sp)-(Rp/Sp). In some embodiments, a provided pattern of backbone chiral centers comprises (Rp)x-(All Sp)-(Rp)y. In some embodiments, a provided pattern of backbone chiral centers comprises (Rp)-(All Sp)-(Rp). In some embodiments, a provided pattern of backbone chiral centers comprises (Sp)x-(All Rp)-(Sp)y. In some embodiments, a provided pattern of backbone chiral centers comprises (Sp)-(All Rp)-(Sp). In some embodiments, a provided pattern of backbone chiral centers comprises (Rp/Sp)x-(repeating (Sp)m(Rp)n)-(Rp/Sp)y. In some embodiments, a provided pattern of backbone chiral centers comprises (Rp/Sp)-(repeating (Sp)m(Rp)n)-(Rp/Sp). In some embodiments, a provided pattern of backbone chiral centers comprises (Rp/Sp)x-(repeating SpSpRp)-(Rp/Sp)y. In some embodiments, a provided pattern of backbone chiral centers comprises (Rp/Sp)-(repeating SpSpRp)-(Rp/Sp).

[0985] In some embodiments, a provided pattern of backbone chiral centers is (Rp/Sp)x-(All Rp or All Sp)-(Rp/Sp)y. In some embodiments, a provided pattern of backbone chiral centers is (Rp/Sp)-(All Rp or All Sp)-(Rp/Sp). In some embodiments, a provided pattern of backbone chiral centers is (Rp)x-(All Sp)-(Rp)y. In some embodiments, a provided pattern of backbone chiral centers is (Rp)-(All Sp)-(Rp). In some embodiments, a provided pattern of backbone chiral centers is (Sp)x-(All Rp)-(Sp)y. In some embodiments, a provided pattern of backbone chiral centers is (Sp)-(All Rp)-(Sp). In some embodiments, a provided pattern of backbone chiral centers is (Rp/Sp)x-(repeating (Sp)m(Rp)n)-(Rp/Sp)y. In some embodiments, a provided pattern of backbone chiral centers is (Rp/Sp)-(repeating (Sp)m(Rp)n)-(Rp/Sp). In some embodiments, a provided pattern of backbone chiral centers is (Rp/Sp)x-(repeating SpSpRp)-(Rp/Sp)y. In some embodiments, a provided pattern of backbone chiral centers is (Rp/Sp)-(repeating SpSpRp)-(Rp/Sp).

[0986] A person of ordinary skill in the art understands that various regions of a target transcript can be targeted by provided compositions and methods. In some embodiments, a base sequence of provided oligonucleotides comprises an intron sequence. In some embodiments, a base sequence of provided oligonucleotides comprises an exon sequence. In some embodiments, a base sequence of provided oligonucleotides comprises an intron and an exon sequence. In some embodiments, a base sequence of provided oligonucleotides comprises a sequence spanning a splicing site. In some embodiments, a base sequence of provided oligonucleotides comprises a sequence found in or comprising a 5′ splice site, a branch point sequence (BPS), a polypyrimidine tact (py tact), a 3′ splice site, an intronic splicing silencer (ISS), an exonic splicing silencer (ESS), an intronic splicing enhancer (ISE), and/or an exonic splicing enhancer. In some embodiments, a base sequence of provided oligonucleotides is an intron sequence. In some embodiments, a base sequence of provided oligonucleotides is an exon sequence. In some embodiments, a base sequence of provided oligonucleotides is a sequence spanning a splicing site. In some embodiments, a base sequence of provided oligonucleotides is a sequence found in or comprising a 5′ splice site, a branch point sequence (BPS), a polypyrimidine tact (py tact), a 3′ splice site, an intronic splicing silencer (ISS), an exonic splicing silencer (ESS), an intronic splicing enhancer (ISE), and/or an exonic splicing enhancer. In some embodiments, a base sequence of provided oligonucleotides is a sequence found in a branch point sequence (BPS), a polypyrimidine tact (py tact), an intronic splicing silencer (ISS), an exonic splicing silencer (ESS), an intronic splicing enhancer (ISE), and/or an exonic splicing enhancer.

[0987] As understood by a person having ordinary skill in the art, provided oligonucleotides and compositions, among other things, can target a great number of nucleic acid polymers. For instance, in some embodiments, provided oligonucleotides and compositions may target a transcript of a nucleic acid sequence, wherein a common base sequence of oligonucleotides (e.g., a base sequence of an oligonucleotide type) comprises or is a sequence complementary to a sequence of the transcript. In some embodiments, a common base sequence comprises a sequence complimentary to a sequence of a target. In some embodiments, a common base sequence is a sequence complimentary to a sequence of a target. In some embodiments, a common base sequence comprises or is a sequence 100% complimentary to a sequence of a target. In some embodiments, a common base sequence comprises a sequence 100% complimentary to a sequence of a target. In some embodiments, a common base sequence is a sequence 100% complimentary to a sequence of a target. In some embodiments, a common base sequence in a core comprises or is a sequence complimentary to a sequence of a target. In some embodiments, a common base sequence in a core comprises a sequence complimentary to a sequence of a target. In some embodiments, a common base sequence in a core is a sequence % complimentary to a sequence of a target. In some embodiments, a common base sequence in a core comprises or is a sequence 100% complimentary to a sequence of a target. In some embodiments, a common base sequence in a core comprises a sequence 100% complimentary to a sequence of a target. In some embodiments, a common base sequence in a core is a sequence 100% complimentary to a sequence of a target.

[0988] In some embodiments, as described in this disclosure, provided oligonucleotides and compositions may provide new cleavage patterns, higher cleavage rate, higher cleavage degree, higher cleavage selectivity, etc. In some embodiments, provided compositions can selectively suppress (e.g., cleave) a transcript from a target nucleic acid sequence which has one or more similar sequences exist within a subject or a population, each of the target and its similar sequences contains a specific nucleotidic characteristic sequence element that defines the target sequence relative to the similar sequences. In some embodiments, for example, a target sequence is a wild-type allele or copy of a gene, and a similar sequence is a sequence has very similar base sequence, e.g., a sequence having SNP, mutations, etc.

[0989] In some embodiments, a similar sequence has greater than 60%, 65%, 70%, 75%, 80%, 85%, 90%, 91%, 92%, 93%, 94%, 95%, 96%, 97%, 98% or 99% sequence homology with a target sequence. In some embodiments, a target sequence is a disease-causing copy of a nucleic acid sequence comprising one or more mutations and/or SNPs, and a similar sequence is a copy not causing the disease (wild type). In some embodiments, a target sequence comprises a mutation, wherein a similar sequence is the corresponding wild-type sequence. In some embodiments, a target sequence is a mutant allele, while a similar sequence is a wild-type allele. In some embodiments, a target sequence comprises an SNP that is associated with a disease-causing allele, while a similar sequence comprises the same SNP that is not associates with the disease-causing allele. In some embodiments, the region of a target sequence that is complementary to a common base sequence of a provided oligonucleotide composition has greater than 60%, 65%, 70%, 75%, 80%, 85%, 90%, 91%, 92%, 93%, 94%, 95%, 96%, 97%, 98% or 99% sequence homology with the corresponding region of a similar sequence. In some embodiments, the region of a target sequence that is complementary to a common base sequence of a provided oligonucleotide composition differs from the corresponding region of a similar sequence at less than 5, less than 4, less than 3, less than 2, or only 1 base pairs. In some embodiments, the region of a target sequence that is complementary to a common base sequence of a provided oligonucleotide composition differs from the corresponding region of a similar sequence only at a mutation site or SNP site. In some embodiments, the region of a target sequence that is complementary to a common base sequence of a provided oligonucleotide composition differs from the corresponding region of a similar sequence only at a mutation site. In some embodiments, the region of a target sequence that is complementary to a common base sequence of a provided oligonucleotide composition differs from the corresponding region of a similar sequence only at an SNP site.

[0990] In some embodiments, a common base sequence comprises or is a sequence complementary to a characteristic sequence element. In some embodiments, a common base sequence comprises a sequence complementary to a characteristic sequence element. In some embodiments, a common base sequence is a sequence complementary to a characteristic sequence element. In some embodiments, a common base sequence comprises or is a sequence 100% complementary to a characteristic sequence element. In some embodiments, a common base sequence comprises a sequence 100% complementary to a characteristic sequence element. In some embodiments, a common base sequence is a sequence 100% complementary to a characteristic sequence element. In some embodiments, a common base sequence in a core comprises or is a sequence complementary to a characteristic sequence element. In some embodiments, a common base sequence in a core comprises a sequence complementary to a characteristic sequence element. In some embodiments, a common base sequence in a core is a sequence complementary to a characteristic sequence element. In some embodiments, a common base sequence in a core comprises or is a sequence 100% complementary to a characteristic sequence element. In some embodiments, a common base sequence in a core comprises a sequence 100% complementary to a characteristic sequence element. In some embodiments, a common base sequence in a core is a sequence 100% complementary to a characteristic sequence element.

[0991] Among other things, the present disclosure recognizes that a base sequence may have impact on oligonucleotide properties. In some embodiments, a base sequence may have impact on cleavage pattern of a target when oligonucleotides having the base sequence are utilized for suppressing a target, e.g., through a pathway involving RNase H: for example, FIG. 33 demonstrates that structurally similar (all phosphorothioate linkages, all stereorandom) oligonucleotides have different sequences may have different cleavage patterns. In some embodiments, a common base sequence of a non-stereorandom oligonucleotide compositions (e.g., certain oligonucleotide compositions provided in the present disclosure) is a base sequence that when applied to a DNA oligonucleotide composition or a stereorandom all-phosphorothioate oligonucleotide composition, cleavage pattern of the DNA (DNA cleavage pattern) and/or the stereorandom all-phosphorothioate (stereorandom cleavage pattern) composition has a cleavage site within or in the vicinity of a characteristic sequence element. In some embodiments, a cleavage site within or in the vicinity is within a sequence complementary to a core region of a common sequence. In some embodiments, a cleavage site within or in the vicinity is within a sequence 100% complementary to a core region of a common sequence.

[0992] In some embodiments, a common base sequence is a base sequence that has a cleavage site within or in the vicinity of a characteristic sequence element in its DNA cleavage pattern. In some embodiments, a common base sequence is a base sequence that has a cleavage site within a characteristic sequence element in its DNA cleavage pattern. In some embodiments, a common base sequence is a base sequence that has a cleavage site in the vicinity of a characteristic sequence element in its DNA cleavage pattern. In some embodiments, a common base sequence is a base sequence that has a cleavage site in the vicinity of a mutation or SNP of a characteristic sequence element in its DNA cleavage pattern. In some embodiments, a common base sequence is a base sequence that has a cleavage site in the vicinity of a mutation in its DNA cleavage pattern. In some embodiments, a common base sequence is a base sequence that has a cleavage site in the vicinity of an SNP in its DNA cleavage pattern.

[0993] In some embodiments, a common base sequence is a base sequence that has a cleavage site within or in the vicinity of a characteristic sequence element in its stereorandom cleavage pattern. In some embodiments, a common base sequence is a base sequence that has a cleavage site within a characteristic sequence element in its stereorandom cleavage pattern. In some embodiments, a common base sequence is a base sequence that has a cleavage site in the vicinity of a characteristic sequence element in its stereorandom cleavage pattern. In some embodiments, a common base sequence is a base sequence that has a cleavage site in the vicinity of a mutation or SNP of a characteristic sequence element in its stereorandom cleavage pattern. In some embodiments, a common base sequence is a base sequence that has a cleavage site in the vicinity of a mutation in its stereorandom cleavage pattern. In some embodiments, a common base sequence is a base sequence that has a cleavage site in the vicinity of an SNP in its stereorandom cleavage pattern.

[0994] In some embodiments, a common base sequence comprises or is a sequence complementary to a nucleic acid sequence. In some embodiments, a common base sequence comprises or is a sequence 100% complementary to a nucleic acid sequence. In some embodiments, a common base sequence comprises or is a sequence complementary to a disease-causing nucleic acid sequence. In some embodiments, a common base sequence comprises or is a sequence 100% complementary to a disease-causing nucleic acid sequence. In some embodiments, a common base sequence comprises or is a sequence complementary to a characteristic sequence element of disease-causing nucleic acid sequence, which characteristic sequences differentiate a disease-causing nucleic acid sequence from a non-diseasing-causing nucleic acid sequence. In some embodiments, a common base sequence comprises or is a sequence 100% complementary to a characteristic sequence element of disease-causing nucleic acid sequence, which characteristic sequences differentiate a disease-causing nucleic acid sequence from a non-diseasing-causing nucleic acid sequence. In some embodiments, a common base sequence comprises or is a sequence complementary to a disease-associated nucleic acid sequence. In some embodiments, a common base sequence comprises or is a sequence 100% complementary to a disease-associated nucleic acid sequence. In some embodiments, a common base sequence comprises or is a sequence complementary to a characteristic sequence element of disease-associated nucleic acid sequence, which characteristic sequences differentiate a disease-associated nucleic acid sequence from a non-diseasing-associated nucleic acid sequence. In some embodiments, a common base sequence comprises or is a sequence 100% complementary to a characteristic sequence element of disease-associated nucleic acid sequence, which characteristic sequences differentiate a disease-associated nucleic acid sequence from a non-diseasing-associated nucleic acid sequence.

[0995] In some embodiments, a common base sequence comprises or is a sequence complementary to a gene. In some embodiments, a common base sequence comprises or is a sequence 100% complementary to a gene. In some embodiments, a common base sequence comprises or is a sequence complementary to a characteristic sequence element of a gene, which characteristic sequences differentiate the gene from a similar sequence sharing homology with the gene. In some embodiments, a common base sequence comprises or is a sequence 100% complementary to a characteristic sequence element of a gene, which characteristic sequences differentiate the gene from a similar sequence sharing homology with the gene. In some embodiments, a common base sequence comprises or is a sequence complementary to characteristic sequence element of a target gene, which characteristic sequences comprises a mutation that is not found in other copies of the gene, e.g., the wild-type copy of the gene, another mutant copy the gene, etc. In some embodiments, a common base sequence comprises or is a sequence 100% complementary to characteristic sequence element of a target gene, which characteristic sequences comprises a mutation that is not found in other copies of the gene, e.g., the wild-type copy of the gene, another mutant copy the gene, etc.

[0996] In some embodiments, a common base sequence comprises or is a sequence complementary to a sequence comprising an SNP. In some embodiments, a common base sequence comprises or is a sequence complementary to a sequence comprising an SNP, and the common base sequence is 100% complementary to the SNP that is associated with a disease.

[0997] In some embodiments, a chiral internucleotidic linkage in provided oligonucleotides has the structure of formula I. In some embodiments, a chiral internucleotidic linkage is phosphorothioate. In some embodiments, each chiral internucleotidic linkage in a single oligonucleotide of a provided composition independently has the structure of formula I. In some embodiments, each chiral internucleotidic linkage in a single oligonucleotide of a provided composition is a phosphorothioate.

[0998] In some embodiments, oligonucleotides of the present disclosure comprise one or more modified sugar moieties. In some embodiments, oligonucleotides of the present disclosure comprise one or more modified base moieties. As known by a person of ordinary skill in the art and described in the disclosure, various modifications can be introduced to a sugar and/or moiety. For example, in some embodiments, a modification is a modification described in U.S. Pat. No. 9,006,198, WO2014/012081 and WO/2015/107425, the sugar and base modifications of each of which are incorporated herein by reference.

[0999] In some embodiments, a sugar modification is a 2′-modification. Commonly used 2′-modifications include but are not limited to 2′-OR¹, wherein R¹ is not hydrogen. In some embodiments, a modification is 2′-OR, wherein R is optionally substituted aliphatic. In some embodiments, a modification is 2′-OMe. In some embodiments, a modification is 2′-O— MOE. In some embodiments, the present disclosure demonstrates that inclusion and/or location of particular chirally pure internucleotidic linkages can provide stability improvements comparable to or better than those achieved through use of modified backbone linkages, bases, and/or sugars. In some embodiments, a provided single oligonucleotide of a provided composition has no modifications on the sugars. In some embodiments, a provided single oligonucleotide of a provided composition has no modifications on 2′-positions of the sugars (i.e., the two groups at the 2′-position are either —H/—H or —H/—OH). In some embodiments, a provided single oligonucleotide of a provided composition does not have any 2′-MOE modifications.

[1000] In some embodiments, a 2′-modification is —O-L- or -L- which connects the 2′-carbon of a sugar moiety to another carbon of a sugar moiety. In some embodiments, a 2′-modification is —O-L- or -L- which connects the 2′-carbon of a sugar moiety to the 4′-carbon of a sugar moiety. In some embodiments, a 2′-modification is S-cEt. In some embodiments, a modified sugar moiety is an LNA moiety.

[1001] In some embodiments, a 2′-modification is —F. In some embodiments, a 2′-modification is FANA. In some embodiments, a 2′-modification is FRNA.

[1002] In some embodiments, a sugar modification is a 5′-modification, e.g., R-5′-Me, S-5′-Me, etc.

[1003] In some embodiments, a sugar modification changes the size of the sugar ring. In some embodiments, a sugar modification is the sugar moiety in FHNA.

[1004] In some embodiments, a sugar modification replaces a sugar moiety with another cyclic or acyclic moiety. Example such moieties are widely known in the art, including but not limited to those used in morpholino (optionally with its phosphorodiamidate linkage), glycol nucleic acids, etc.

[1005] In some embodiments, a provided oligonucleotide in a provided composition has at least about 25% of its internucleotidic linkages in Sp configuration. In some embodiments, a provided oligonucleotide in a provided composition has at least about 30% of its internucleotidic linkages in Sp configuration. In some embodiments, a provided oligonucleotide in a provided composition has at least about 35% of its internucleotidic linkages in Sp configuration. In some embodiments, a provided oligonucleotide in a provided composition has at least about 40% of its internucleotidic linkages in Sp configuration. In some embodiments, a provided oligonucleotide in a provided composition has at least about 45% of its internucleotidic linkages in Sp configuration. In some embodiments, a provided oligonucleotide in a provided composition has at least about 50% of its internucleotidic linkages in Sp configuration. In some embodiments, a provided oligonucleotide in a provided composition has at least about 55% of its internucleotidic linkages in Sp configuration. In some embodiments, a provided oligonucleotide in a provided composition has at least about 60% of its internucleotidic linkages in Sp configuration. In some embodiments, a provided oligonucleotide in a provided composition has at least about 65% of its internucleotidic linkages in Sp configuration. In some embodiments, a provided oligonucleotide in a provided composition has at least about 70% of its internucleotidic linkages in Sp configuration. In some embodiments, a provided oligonucleotide in a provided composition has at least about 75% of its internucleotidic linkages in Sp configuration. In some embodiments, a provided oligonucleotide in a provided composition has at least about 80% of its internucleotidic linkages in Sp configuration. In some embodiments, a provided oligonucleotide in a provided composition has at least about 85% of its internucleotidic linkages in Sp configuration. In some embodiments, a provided oligonucleotide in a provided composition has at least about 90% of its internucleotidic linkages in Sp configuration.

[1006] In some embodiments, the present disclosure provides chirally controlled oligonucleotide compositions which are of high crude purity and of high diastereomeric purity. In some embodiments, the present disclosure provides and chirally controlled oligonucleotide compositions which are of high crude purity. In some embodiments, the present disclosure provides chirally controlled oligonucleotide compositions which are of high diastereomeric purity.

[1007] In some embodiments, a chirally controlled oligonucleotide composition is a substantially pure preparation of an oligonucleotide type in that oligonucleotides in the composition that are not of the oligonucleotide type are impurities form the preparation process of said oligonucleotide type, in some case, after certain purification procedures.

[1008] In some embodiments, the present disclosure provides oligonucleotides comprising one or more diastereomerically pure internucleotidic linkages with respect to the chiral linkage phosphorus within the composition. In some embodiments, the present disclosure provides oligonucleotides comprising one or more diastereomerically pure internucleotidic linkages having the structure of formula I. In some embodiments, the present disclosure provides oligonucleotides comprising one or more diastereomerically pure internucleotidic linkages with respect to the chiral linkage phosphorus, and one or more phosphate diester linkages. In some embodiments, the present disclosure provides oligonucleotides comprising one or more diastereomerically pure internucleotidic linkages having the structure of formula I, and one or more phosphate diester linkages. In some embodiments, the present disclosure provides oligonucleotides comprising one or more diastereomerically pure internucleotidic linkages having the structure of formula I-c, and one or more phosphate diester linkages. In some embodiments, such oligonucleotides are prepared by using stereoselective oligonucleotide synthesis, as described in this application, to form pre-designed diastereomerically pure internucleotidic linkages with respect to the chiral linkage phosphorus.

[1009] In certain embodiments, a modified internucleotidic linkages has the structure of formula I:

[chemical structure]

wherein each variable is as defined and described below. In some embodiments, a linkage of formula I is chiral. In some embodiments, the present disclosure provides oligonucleotides comprising one or more modified internucleotidic linkages of formula I. In some embodiments, the present disclosure provides an oligonucleotide comprising one or more modified internucleotidic linkages of formula I, and wherein individual internucleotidic linkages of formula I within the oligonucleotide have different P-modifications relative to one another. In some embodiments, the present disclosure provides an oligonucleotide comprising one or more modified internucleotidic linkages of formula I, and wherein individual internucleotidic linkages of formula I within the oligonucleotide have different —X-L-R¹ relative to one another. In some embodiments, the present disclosure provides an oligonucleotide comprising one or more modified internucleotidic linkages of formula I, and wherein individual internucleotidic linkages of formula I within the oligonucleotide have different X relative to one another. In some embodiments, the present disclosure provides an oligonucleotide comprising one or more modified internucleotidic linkages of formula I, and wherein individual internucleotidic linkages of formula I within the oligonucleotide have different -L-R¹ relative to one another.

[1010] In some embodiments, a chirally controlled oligonucleotide is an oligonucleotide in a chirally controlled composition that is of the particular oligonucleotide type, and the chirally controlled oligonucleotide is of the type. In some embodiments, a chirally controlled oligonucleotide is an oligonucleotide in a provided composition that comprises a predetermined level of a plurality of oligonucleotides that share a common base sequence, a common pattern of backbone linkages, and a common pattern of backbone chiral centers, and the chirally controlled oligonucleotide shares the common base sequence, the common pattern of backbone linkages, and the common pattern of backbone chiral centers.

[1011] In some embodiments, the present disclosure provides a chirally controlled oligonucleotide, wherein at least two of the individual internucleotidic linkages within the oligonucleotide have different stereochemistry and/or different P-modifications relative to one another. In some embodiments, the present disclosure provides a chirally controlled oligonucleotide, wherein at least two of the individual internucleotidic linkages within the oligonucleotide have different stereochemistry relative to one another, and wherein at least a portion of the structure of the chirally controlled oligonucleotide is characterized by a repeating pattern of alternating stereochemistry.

[1012] In some embodiments, the present disclosure provides a chirally controlled oligonucleotide, wherein at least two of the individual internucleotidic linkages within the oligonucleotide have different P-modifications relative to one another, in that they have different X atoms in their —XLR¹ moieties, and/or in that they have different L groups in their —XLR¹ moieties, and/or that they have different R¹ atoms in their —XLR¹ moieties.

[1013] In some embodiments, the present disclosure provides a chirally controlled oligonucleotide, wherein at least two of the individual internucleotidic linkages within the oligonucleotide have different stereochemistry and/or different P-modifications relative to one another and the oligonucleotide has a structure represented by the following formula:

[S^{B}n1R^{B}n2S^{B}n3R^{B}n4 . . . S^{B}nxR^{B}ny]

wherein:
[1014] each R^{B} independently represents a block of nucleotide units having the R configuration at the linkage phosphorus;
[1015] each S^{B} independently represents a block of nucleotide units having the S configuration at the linkage phosphorus;
[1016] each of n1-ny is zero or an integer, with the requirement that at least one odd n and at least one even n must be non-zero so that the oligonucleotide includes at least two individual internucleotidic linkages with different stereochemistry relative to one another; and
   wherein the sum of n1-ny is between 2 and 200, and in some embodiments is between a lower limit selected from the group consisting of 2, 3, 4, 5, 6, 7, 8, 9, 10, 11, 12, 13, 14, 15, 16, 17, 18, 19, 20, 21, 22, 23, 24, 25 or more and an upper limit selected from the group consisting of 5, 10, 15, 20, 25, 30, 35, 40, 45, 50, 55, 60, 65, 70, 75, 80, 85, 90, 95, 100, 110, 120, 130, 140, 150, 160, 170, 180, 190, and 200, the upper limit being larger than the lower limit.

[1017] In some such embodiments, each n has the same value; in some embodiments, each even n has the same value as each other even n; in some embodiments, each odd n has the same value each other odd n; in some embodiments, at least two even ns have different values from one another; in some embodiments, at least two odd ns have different values from one another.

[1018] In some embodiments, at least two adjacent ns are equal to one another, so that a provided oligonucleotide includes adjacent blocks of S stereochemistry linkages and R stereochemistry linkages of equal lengths. In some embodiments, provided oligonucleotides include repeating blocks of S and R stereochemistry linkages of equal lengths. In some embodiments, provided oligonucleotides include repeating blocks of S and R stereochemistry linkages, where at least two such blocks are of different lengths from one another; in some such embodiments each S stereochemistry block is of the same length, and is of a different length from each R stereochemistry length, which may optionally be of the same length as one another.

[1019] In some embodiments, at least two skip-adjacent ns are equal to one another, so that a provided oligonucleotide includes at least two blocks of linkages of a first stereochemistry that are equal in length to one another and are separated by a block of linkages of the other stereochemistry, which separating block may be of the same length or a different length from the blocks of first stereochemistry.

[1020] In some embodiments, ns associated with linkage blocks at the ends of a provided oligonucleotide are of the same length. In some embodiments, provided oligonucleotides have terminal blocks of the same linkage stereochemistry. In some such embodiments, the terminal blocks are separated from one another by a middle block of the other linkage stereochemistry.

[1021] In some embodiments, a provided oligonucleotide of formula [S^{B}n1R^{B}n2S^{B}n3R^{B}n4 . . . S^{B}nxR^{B}ny] is a stereoblockmer. In some embodiments, a provided oligonucleotide of formula [S^{B}n1R^{B}n2S^{B}n3R^{B}n4 . . . S^{B}nxR^{B}ny] is a stereoskipmer. In some embodiments, a provided oligonucleotide of formula [S^{B}n1R^{B}n2S^{B}n3R^{B}n4 . . . S^{B}nxR^{B}ny] is a stereoaltmer. In some embodiments, a provided oligonucleotide of formula [S^{B}n1R^{B}n2S^{B}n3R^{B}n4 . . . S^{B}nxR^{B}ny] is a gapmer.

[1022] In some embodiments, a provided oligonucleotide of formula [S^{B}n1R^{B}n2S^{B}n3R^{B}n4 . . . S^{B}nxR^{B}ny] is of any of the above described patterns and further comprises patterns of P-modifications. For instance, in some embodiments, a provided oligonucleotide of formula [S^{B}n1R^{B}n2S^{B}n3R^{B}n4 . . . S^{B}nxR^{B}ny] and is a stereoskipmer and P-modification skipmer. In some embodiments, a provided oligonucleotide of formula [S^{B}n1R^{B}n2S^{B}n3R^{B}n4 . . . S^{B}nxR^{B}ny] and is a stereoblockmer and P-modification altmer. In some embodiments, a provided oligonucleotide of formula [S^{B}n1R^{B}n2S^{B}n3R^{B}n4 . . . S^{B}nxR^{B}ny] and is a stereoaltmer and P-modification blockmer.

[1023] In some embodiments, a provided oligonucleotide, for example, an oligonucleotide of formula [S^{B}n1R^{B}n2S^{B}n3R^{B}n4 . . . S^{B}nxR^{B}ny], is a chirally controlled oligonucleotide comprising one or more modified internucleotidic linkages independently having the structure of formula I.

[chemical structure]

wherein:
[1024] P* is an asymmetric phosphorus atom and is either Rp or Sp;
[1025] W is O, S or Se;
[1026] each of X, Y and Z is independently —O—, —S—, —N(-L-R¹)—, or L;
[1027] L is a covalent bond or an optionally substituted, linear or branched C₁-C₁₀ alkylene, wherein one or more methylene units of L are optionally and independently replaced by an optionally substituted group selected from C₁-C₆ alkylene, C₁-C₆ alkenylene, —C≡C—, a C₁-C₆ heteroaliphatic moiety, —C(R′)₂—, -Cy-, —O—, —S—, —S—S—, —N(R′)—, —C(O)—, —C(S)—, —C(NR′)—, —C(O)N(R′)—, —N(R′)C(O)N(R′)—, —N(R′)C(O)—, —N(R′)C(O)O—, —OC(O)N(R′)—, —S(O)—, —S(O)₂—, —S(O)₂N(R′)—, —N(R′)S(O)₂— —SC(O)—, —C(O)S—, —OC(O)—, and —C(O)O—;
[1028] R¹ is halogen, R, or an optionally substituted C₁-C₅₀ aliphatic wherein one or more methylene units are optionally and independently replaced by an optionally substituted group selected from C₁-C₆ alkylene, C₁-C₆ alkenylene, —C≡C—, a C₁-C₆ heteroaliphatic moiety, —C(R′)₂—, -Cy-, —O—, —S—, —S—S—, —N(R′)—, —C(O)—, —C(S)—, —C(NR′)—, —C(O)N(R′)—, —N(R′)C(O)N(R′)—, —N(R′)C(O)—, —N(R′)C(O)O—, —OC(O)N(R′)—, —S(O)—, —S(O)₂—, —S(O)₂N(R′)—, —N(R′)S(O)₂— —SC(O)—, —C(O)S—, —OC(O)—, and —C(O)O—
[1029] each R′ is independently —R, —C(O)R, —CO₂R, or —SO₂R, or:
   [1030] two R′ are taken together with their intervening atoms to form an optionally substituted aryl, carbocyclic, heterocyclic, or heteroaryl ring;
[1031] -Cy- is an optionally substituted bivalent ring selected from phenylene, carbocyclylene, arylene, heteroarylene, and heterocyclylene;
[1032] each R is independently hydrogen, or an optionally substituted group selected from C₁-C₆ aliphatic, carbocyclyl, aryl, heteroaryl, and heterocyclyl; and
[1033] each

[chemical structure]

independently represents a connection to a nucleoside.

[1034] In some embodiments, a chirally controlled oligonucleotide comprises one or more modified internucleotidic phosphorus linkages. In some embodiments, a chirally controlled oligonucleotide comprises, e.g., a phosphorothioate or a phosphorothioate triester linkage. In some embodiments, a chirally controlled oligonucleotide comprises a phosphorothioate triester linkage. In some embodiments, a chirally controlled oligonucleotide comprises at least two phosphorothioate triester linkages. In some embodiments, a chirally controlled oligonucleotide comprises at least three phosphorothioate triester linkages. In some embodiments, a chirally controlled oligonucleotide comprises at least four phosphorothioate triester linkages. In some embodiments, a chirally controlled oligonucleotide comprises at least five phosphorothioate triester linkages. Example such modified internucleotidic phosphorus linkages are described further herein.

[1035] In some embodiments, a chirally controlled oligonucleotide comprises different internucleotidic phosphorus linkages. In some embodiments, a chirally controlled oligonucleotide comprises at least one phosphate diester internucleotidic linkage and at least one modified internucleotidic linkage. In some embodiments, a chirally controlled oligonucleotide comprises at least one phosphate diester internucleotidic linkage and at least one phosphorothioate triester linkage. In some embodiments, a chirally controlled oligonucleotide comprises at least one phosphate diester internucleotidic linkage and at least two phosphorothioate triester linkages. In some embodiments, a chirally controlled oligonucleotide comprises at least one phosphate diester internucleotidic linkage and at least three phosphorothioate triester linkages. In some embodiments, a chirally controlled oligonucleotide comprises at least one phosphate diester internucleotidic linkage and at least four phosphorothioate triester linkages. In some embodiments, a chirally controlled oligonucleotide comprises at least one phosphate diester internucleotidic linkage and at least five phosphorothioate triester linkages. Example such modified internucleotidic phosphorus linkages are described further herein.

[1036] In some embodiments, a phosphorothioate triester linkage comprises a chiral auxiliary, which, for example, is used to control the stereoselectivity of a reaction. In some embodiments, a phosphorothioate triester linkage does not comprise a chiral auxiliary. In some embodiments, a phosphorothioate triester linkage is intentionally maintained until and/or during the administration to a subject.

[1037] In some embodiments, a chirally controlled oligonucleotide is linked to a solid support. In some embodiments, a chirally controlled oligonucleotide is cleaved from a solid support.

[1038] In some embodiments, a chirally controlled oligonucleotide comprises at least one phosphate diester internucleotidic linkage and at least two consecutive modified internucleotidic linkages. In some embodiments, a chirally controlled oligonucleotide comprises at least one phosphate diester internucleotidic linkage and at least two consecutive phosphorothioate triester internucleotidic linkages.

[1039] In some embodiments, a chirally controlled oligonucleotide is a blockmer. In some embodiments, a chirally controlled oligonucleotide is a stereoblockmer. In some embodiments, a chirally controlled oligonucleotide is a P-modification blockmer. In some embodiments, a chirally controlled oligonucleotide is a linkage blockmer.

[1040] In some embodiments, a chirally controlled oligonucleotide is an altmer. In some embodiments, a chirally controlled oligonucleotide is a stereoaltmer. In some embodiments, a chirally controlled oligonucleotide is a P-modification altmer. In some embodiments, a chirally controlled oligonucleotide is a linkage altmer.

[1041] In some embodiments, a chirally controlled oligonucleotide is a unimer. In some embodiments, a chirally controlled oligonucleotide is a stereounimer. In some embodiments, a chirally controlled oligonucleotide is a P-modification unimer. In some embodiments, a chirally controlled oligonucleotide is a linkage unimer.

[1042] In some embodiments, a chirally controlled oligonucleotide is a gapmer.

[1043] In some embodiments, a chirally controlled oligonucleotide is a skipmer.

[1044] In some embodiments, the present disclosure provides oligonucleotides comprising one or more modified internucleotidic linkages independently having the structure of formula I:

[chemical structure]

wherein:
[1045] P* is an asymmetric phosphorus atom and is either Rp or Sp;
[1046] W is O, S or Se;
[1047] each of X, Y and Z is independently —O—, —S—, —N(-L-R′)—, or L; L is a covalent bond or an optionally substituted, linear or branched C₁-C₁₀ alkylene, wherein one or more methylene units of L are optionally and independently replaced by an optionally substituted group selected from C₁-C₆ alkylene, C₁-C₆ alkenylene, —C≡C—, a C₁-C₆ heteroaliphatic moiety, —C(R′)₂—, -Cy-, —O—, —S—, —S—S—, —N(R′)—, —C(O)—, —C(S)—, —C(NR′)—, —C(O)N(R′)—, —N(R′)C(O)N(R′)—, —N(R′)C(O)—, —N(R′)C(O)O—, —OC(O)N(R′)—, —S(O)—, —S(O)₂—, —S(O)₂N(R′)—, —N(R′)S(O)₂— —SC(O)—, —C(O)S—, —OC(O)—, and —C(O)O—;
[1048] R¹ is halogen, R, or an optionally substituted C₁-C₅₀ aliphatic wherein one or more methylene units are optionally and independently replaced by an optionally substituted group selected from C₁-C₆ alkylene, C₁-C₆ alkenylene, —C≡C—, a C₁-C₆ heteroaliphatic moiety, —C(R′)₂—, -Cy-, —O—, —S—, —S—S—, —N(R′)—, —C(O)—, —C(S)—, —C(NR′)—, —C(O)N(R′)—, —N(R′)C(O)N(R′)—, —N(R′)C(O)—, —N(R′)C(O)O—, —OC(O)N(R′)—, —S(O)—, —S(O)₂—, —S(O)₂N(R′)—, —N(R′)S(O)₂— —SC(O)—, —C(O)S—, —OC(O)—, and —C(O)O—
[1049] each R′ is independently —R, —C(O)R, —CO₂R, or —SO₂R, or:
   [1050] two R′ are taken together with their intervening atoms to form an optionally substituted aryl, carbocyclic, heterocyclic, or heteroaryl ring;
[1051] -Cy- is an optionally substituted bivalent ring selected from phenylene, carbocyclylene, arylene, heteroarylene, and heterocyclylene;
[1052] each R is independently hydrogen, or an optionally substituted group selected from C₁-C₆ aliphatic, carbocyclyl, aryl, heteroaryl, and heterocyclyl; and
[1053] each [symbol] independently represents a connection to a nucleoside.

[1054] In some embodiments, a modified internucleotidic linkage is phosphorothioate. Examples of internucleotidic linkages having the structure of formula (I) are widely known in the art, including but not limited to those described in US 20110294124, US 20120316224, US 20140194610, US 20150211006, US 20150197540, WO 2015107425, PCT/US2016/043542, and PCT/US2016/043598, each of which is incorporated herein by reference.

[1055] Non-limiting examples of internucleotidic linkages also include those described in the art, including, but not limited to, those described in any of: Gryaznov, S.; Chen, J.-K. J. Am. Chem. Soc. 1994, 116, 3143, Jones et al. J. Org. Chem. 1993, 58, 2983, Koshkin et al. 1998 Tetrahedron 54: 3607-3630, Lauritsen et al. 2002 Chem. Comm. 5: 530-531, Lauritsen et al. 2003 Bioo. Med. Chem. Lett. 13: 253-256, Mesmaeker et al. Angew. Chem., Int. Ed. Engl. 1994, 33, 226, Petersen et al. 2003 TRENDS Biotech. 21: 74-81, Schultz et al. 1996 Nucleic Acids Res. 24: 2966, Ts'o et al. 1988 Ann. N. Y. Acad. Sci. 507: 220, and Vasseur et al. J. Am. Chem. Soc. 1992, 114, 4006; and those described in Carbohydrate Modifications in Antisense Research; Sanghvi and Cook, eds., ACS Symposium Series 580: Chapters 3 and 4, 40-65).

[1056] In some embodiments, P* is an asymmetric phosphorus atom and is either Rp or Sp. In some embodiments, P* is Rp. In other embodiments, P* is Sp. In some embodiments, an oligonucleotide comprises one or more internucleotidic linkages of formula I wherein each P* is independently Rp or Sp. In some embodiments, an oligonucleotide comprises one or more internucleotidic linkages of formula I wherein each P* is Rp. In some embodiments, an oligonucleotide comprises one or more internucleotidic linkages of formula I wherein each P* is Sp. In some embodiments, an oligonucleotide comprises at least one internucleotidic linkage of formula I wherein P* is Rp. In some embodiments, an oligonucleotide comprises at least one internucleotidic linkage of formula I wherein P* is Sp. In some embodiments, an oligonucleotide comprises at least one internucleotidic linkage of formula I wherein P* is Rp, and at least one internucleotidic linkage of formula I wherein P* is Sp.

[1057] In some embodiments, W is O, S, or Se. In some embodiments, W is O. In some embodiments, W is S. In some embodiments, W is Se. In some embodiments, an oligonucleotide comprises at least one internucleotidic linkage of formula I wherein W is O. In some embodiments, an oligonucleotide comprises at least one internucleotidic linkage of formula I wherein W is S. In some embodiments, an oligonucleotide comprises at least one internucleotidic linkage of formula I wherein W is Se.

[1058] In some embodiments, each R is independently hydrogen, or an optionally substituted group selected from C₁-C₆ aliphatic, phenyl, carbocyclyl, aryl, heteroaryl, and heterocyclyl.

[1059] In some embodiments, R is hydrogen. In some embodiments, R is an optionally substituted group selected from C₁-C₆ aliphatic, phenyl, carbocyclyl, aryl, heteroaryl, or heterocyclyl.

[1060] In some embodiments, R is an optionally substituted C₁-C₆ aliphatic. In some embodiments, R is an optionally substituted C₁-C₆ alkyl. In some embodiments, R is optionally substituted, linear or branched hexyl. In some embodiments, R is optionally substituted, linear or branched pentyl. In some embodiments, R is optionally substituted, linear or branched butyl. In some embodiments, R is optionally substituted, linear or branched propyl. In some embodiments, R is optionally substituted ethyl. In some embodiments, R is optionally substituted methyl.

[1061] In some embodiments, R is optionally substituted phenyl. In some embodiments, R is substituted phenyl. In some embodiments, R is phenyl.

[1062] In some embodiments, R is optionally substituted carbocyclyl. In some embodiments, R is optionally substituted C₃-C₁₀ carbocyclyl. In some embodiments, R is optionally substituted monocyclic carbocyclyl. In some embodiments, R is optionally substituted cycloheptyl. In some embodiments, R is optionally substituted cyclohexyl. In some embodiments, R is optionally substituted cyclopentyl. In some embodiments, R is optionally substituted cyclobutyl. In some embodiments, R is an optionally substituted cyclopropyl. In some embodiments, R is optionally substituted bicyclic carbocyclyl.

[1063] In some embodiments, R is an optionally substituted aryl. In some embodiments, R is an optionally substituted bicyclic aryl ring.

[1064] In some embodiments, R is an optionally substituted heteroaryl. In some embodiments, R is an optionally substituted 5-6 membered monocyclic heteroaryl ring having 1-3 heteroatoms independently selected from nitrogen, sulfur, or oxygen. In some embodiments, R is a substituted 5-6 membered monocyclic heteroaryl ring having 1-3 heteroatoms independently selected from nitrogen, oxygen, or sulfur. In some embodiments, R is an unsubstituted 5-6 membered monocyclic heteroaryl ring having 1-3 heteroatoms independently selected from nitrogen, sulfur, or oxygen.

[1065] In some embodiments, R is an optionally substituted 5 membered monocyclic heteroaryl ring having 1-3 heteroatoms independently selected from nitrogen, oxygen or sulfur. In some embodiments, R is an optionally substituted 6 membered monocyclic heteroaryl ring having 1-3 heteroatoms independently selected from nitrogen, oxygen, or sulfur.

[1066] In some embodiments, R is an optionally substituted 5-membered monocyclic heteroaryl ring having 1 heteroatom selected from nitrogen, oxygen, or sulfur. In some embodiments, R is selected from pyrrolyl, furanyl, or thienyl.

[1067] In some embodiments, R is an optionally substituted 5-membered heteroaryl ring having 2 heteroatoms independently selected from nitrogen, oxygen, or sulfur. In certain embodiments, R is an optionally substituted 5-membered heteroaryl ring having 1 nitrogen atom, and an additional heteroatom selected from sulfur or oxygen. Example R groups include optionally substituted pyrazolyl, imidazolyl, thiazolyl, isothiazolyl, oxazolyl or isoxazolyl.

[1068] In some embodiments, R is a 6-membered heteroaryl ring having 1-3 nitrogen atoms. In other embodiments, R is an optionally substituted 6-membered heteroaryl ring having 1-2 nitrogen atoms. In some embodiments, R is an optionally substituted 6-membered heteroaryl ring having 2 nitrogen atoms. In certain embodiments, R is an optionally substituted 6-membered heteroaryl ring having 1 nitrogen. Example R groups include optionally substituted pyridinyl, pyrimidinyl, pyrazinyl, pyridazinyl, triazinyl, or tetrazinyl.

[1069] In certain embodiments, R is an optionally substituted 8-10 membered bicyclic heteroaryl ring having 1-4 heteroatoms independently selected from nitrogen, oxygen, or sulfur. In some embodiments, R is an optionally substituted 5,6-fused heteroaryl ring having 1-4 heteroatoms independently selected from nitrogen, oxygen, or sulfur. In other embodiments, R is an optionally substituted 5,6-fused heteroaryl ring having 1-2 heteroatoms independently selected from nitrogen, oxygen, or sulfur. In certain embodiments, R is an optionally substituted 5,6-fused heteroaryl ring having 1 heteroatom independently selected from nitrogen, oxygen, or sulfur. In some embodiments, R is an optionally substituted indolyl. In some embodiments, R is an optionally substituted azabicyclo[3.2.1]octanyl. In certain embodiments, R is an optionally substituted 5,6-fused heteroaryl ring having 2 heteroatoms independently selected from nitrogen, oxygen, or sulfur. In some embodiments, R is an optionally substituted azaindolyl. In some embodiments, R is an optionally substituted benzimidazolyl. In some embodiments, R is an optionally substituted benzothiazolyl. In some embodiments, R is an optionally substituted benzoxazolyl. In some embodiments, R is an optionally substituted indazolyl. In certain embodiments, R is an optionally substituted 5,6-fused heteroaryl ring having 3 heteroatoms independently selected from nitrogen, oxygen, or sulfur.

[1070] In certain embodiments, R is an optionally substituted 6,6-fused heteroaryl ring having 1-4 heteroatoms independently selected from nitrogen, oxygen, or sulfur. In some embodiments, R is an optionally substituted 6,6-fused heteroaryl ring having 1-2 heteroatoms independently selected from nitrogen, oxygen, or sulfur. In other embodiments, R is an optionally substituted 6,6-fused heteroaryl ring having 1 heteroatom independently selected from nitrogen, oxygen, or sulfur. In some embodiments, R is an optionally substituted quinolinyl. In some embodiments, R is an optionally substituted isoquinolinyl. According to one aspect, R is an optionally substituted 6,6-fused heteroaryl ring having 2 heteroatoms independently selected from nitrogen, oxygen, or sulfur. In some embodiments, R is a quinazoline or a quinoxaline.

[1071] In some embodiments, R is an optionally substituted heterocyclyl. In some embodiments, R is an optionally substituted 3-7 membered saturated or partially unsaturated heterocyclic ring having 1-2 heteroatoms independently selected from nitrogen, oxygen, or sulfur. In some embodiments, R is a substituted 3-7 membered saturated or partially unsaturated heterocyclic ring having 1-2 heteroatoms independently selected from nitrogen, oxygen, or sulfur. In some embodiments, R is an unsubstituted 3-7 membered saturated or partially unsaturated heterocyclic ring having 1-2 heteroatoms independently selected from nitrogen, oxygen, or sulfur.

[1072] In some embodiments, R is an optionally substituted heterocyclyl. In some embodiments, R is an optionally substituted 6 membered saturated or partially unsaturated heterocyclic ring having 1-2 heteroatoms independently selected from nitrogen, oxygen, or sulfur. In some embodiments, R is an optionally substituted 6 membered partially unsaturated heterocyclic ring having 2 heteroatoms independently selected from nitrogen, oxygen, or sulfur. In some embodiments, R is an optionally substituted 6 membered partially unsaturated heterocyclic ring having 2 oxygen atom.

[1073] In certain embodiments, R is a 3-7 membered saturated or partially unsaturated heterocyclic ring having 1-2 heteroatoms independently selected from nitrogen, oxygen, or sulfur. In certain embodiments, R is oxiranyl, oxetanyl, tetrahydrofuranyl, tetrahydropyranyl, oxepaneyl, aziridineyl, azetidineyl, pyrrolidinyl, piperidinyl, azepanyl, thiiranyl, thietanyl, tetrahydrothiophenyl, tetrahydrothiopyranyl, thiepanyl, dioxolanyl, oxathiolanyl, oxazolidinyl, imidazolidinyl, thiazolidinyl, dithiolanyl, dioxanyl, morpholinyl, oxathianyl, piperazinyl, thiomorpholinyl, dithianyl, dioxepanyl, oxazepanyl, oxathiepanyl, dithiepanyl, diazepanyl, dihydrofuranonyl, tetrahydropyranonyl, oxepanonyl, pyrolidinonyl, piperidinonyl, azepanonyl, dihydrothiophenonyl, tetrahydrothiopyranonyl, thiepanonyl, oxazolidinonyl, oxazinanonyl, oxazepanonyl, dioxolanonyl, dioxanonyl, dioxepanonyl, oxathiolinonyl, oxathianonyl, oxathiepanonyl, thiazolidinonyl, thiazinanonyl, thiazepanonyl, imidazolidinonyl, tetrahydropyrimidinonyl, diazepanonyl, imidazolidinedionyl, oxazolidinedionyl, thiazolidinedionyl, dioxolanedionyl, oxathiolanedionyl, piperazinedionyl, morpholinedionyl, thiomorpholinedionyl, tetrahydropyranyl, tetrahydrofuranyl, morpholinyl, thiomorpholinyl, piperidinyl, piperazinyl, pyrrolidinyl, tetrahydrothiophenyl, or tetrahydrothiopyranyl. In some embodiments, R is an optionally substituted 5 membered saturated or partially unsaturated heterocyclic ring having 1-2 heteroatoms independently selected from nitrogen, oxygen, or sulfur.

[1074] In certain embodiments, R is an optionally substituted 5-6 membered partially unsaturated monocyclic ring having 1-2 heteroatoms independently selected from nitrogen, oxygen, or sulfur. In certain embodiments, R is an optionally substituted tetrahydropyridinyl, dihydrothiazolyl, dihydrooxazolyl, or oxazolinyl group.

[1075] In some embodiments, R is an optionally substituted 8-10 membered bicyclic saturated or partially unsaturated heterocyclic ring having 1-4 heteroatoms independently selected from nitrogen, oxygen, or sulfur. In some embodiments, R is an optionally substituted indolinyl. In some embodiments, R is an optionally substituted isoindolinyl. In some embodiments, R is an optionally substituted 1, 2, 3, 4-tetrahydroquinoline. In some embodiments, R is an optionally substituted 1, 2, 3, 4-tetrahydroisoquinoline.

[1076] In some embodiments, each R′ is independently —R, —C(O)R, —CO₂R, or —SO₂R, or:
[1077] two R′ on the same nitrogen are taken together with their intervening atoms to form an optionally substituted heterocyclic or heteroaryl ring, or
[1078] two R′ on the same carbon are taken together with their intervening atoms to form an optionally substituted aryl, carbocyclic, heterocyclic, or heteroaryl ring.

[1079] In some embodiments, R′ is —R, —C(O)R, —CO₂R, or —SO₂R, wherein R is as defined above and described herein.

[1080] In some embodiments, R′ is —R, wherein R is as defined and described above and herein. In some embodiments, R′ is hydrogen.

[1081] In some embodiments, R′ is —C(O)R, wherein R is as defined above and described herein. In some embodiments, R′ is —CO₂R, wherein R is as defined above and described herein. In some embodiments, R′ is —SO₂R, wherein R is as defined above and described herein.

[1082] In some embodiments, two R′ on the same nitrogen are taken together with their intervening atoms to form an optionally substituted heterocyclic or heteroaryl ring. In some embodiments, two R′ on the same carbon are taken together with their intervening atoms to form an optionally substituted aryl, carbocyclic, heterocyclic, or heteroaryl ring.

[1083] In some embodiments, -Cy- is an optionally substituted bivalent ring selected from carbocyclylene, arylene, heteroarylene, or heterocyclylene.

[1084] In some embodiments, -Cy- is optionally substituted phenylene. In some embodiments, -Cy- is optionally substituted carbocyclylene. In some embodiments, -Cy- is optionally substituted arylene. In some embodiments, -Cy- is optionally substituted heteroarylene. In some embodiments, -Cy- is optionally substituted heterocyclylene.

[1085] In some embodiments, each of X, Y and Z is independently —O—, —S—, —N(-L-R¹)—, or L, wherein each of L and R¹ is independently as defined above and described below.

[1086] In some embodiments, X is —O—. In some embodiments, X is —S—. In some embodiments, X is —O— or —S—. In some embodiments, an oligonucleotide comprises at least one internucleotidic linkage of formula I wherein X is —O—. In some embodiments, an oligonucleotide comprises at least one internucleotidic linkage of formula I wherein X is —S—. In some embodiments, an oligonucleotide comprises at least one internucleotidic linkage of formula I wherein X is —O—, and at least one internucleotidic linkage of formula I wherein X is —S—. In some embodiments, an oligonucleotide comprises at least one internucleotidic linkage of formula I wherein X is —O—, and at least one internucleotidic linkage of formula I wherein X is —S—, and at least one internucleotidic linkage of formula I wherein L is an optionally substituted, linear or branched C₁-C₁₀ alkylene, wherein one or more methylene units of L are optionally and independently replaced by an optionally substituted C₁-C₆ alkylene, C₁-C₆ alkenylene, —C≡C—, —C(R′)₂—, -Cy-, —O—, —S—, —S—S—, —N(R′)—, —C(O)—, —C(S)—, —C(NR′)—, —C(O)N(R′)—, —N(R′)C(O)N(R′)—, —N(R′)C(O)—, —N(R′)C(O)O—, —OC(O)N(R′)—, —S(O)—, —S(O)₂—, —S(O)₂N(R′)—, —N(R′)S(O)₂—, —SC(O)—, —C(O)S—, —OC(O)—, and —C(O)O—.

[1087] In some embodiments, X is —N(-L-R′)—. In some embodiments, X is —N(R′)—. In some embodiments, X is —N(R′)—. In some embodiments, X is —N(R)—. In some embodiments, X is —NH—.

[1088] In some embodiments, X is L. In some embodiments, X is a covalent bond. In some embodiments, X is or an optionally substituted, linear or branched C₁-C₁₀ alkylene, wherein one or more methylene units of L are optionally and independently replaced by an optionally substituted C₁-C₆ alkylene, C₁-C₆ alkenylene, —C≡C—, —C(R′)₂—, -Cy-, —O—, —S—, —S—S—, —N(R′)—, —C(O)—, —C(S)—, —C(NR′)—, —C(O)N(R′)—, —N(R′)C(O)N(R′)—, —N(R′)C(O)—, —N(R′)C(O)O—, —OC(O)N(R′)—, —S(O)—, —S(O)₂—, —S(O)₂N(R′)—, —N(R′)S(O)₂—, —SC(O)—, —C(O)S—, —OC(O)—, or —C(O)O—. In some embodiments, X is an optionally substituted C₁-C₁₀ alkylene or C₁-C₁₀ alkenylene. In some embodiments, X is methylene.

[1089] In some embodiments, Y is —O—. In some embodiments, Y is —S—.

[1090] In some embodiments, Y is —N(-L-R′)—. In some embodiments, Y is —N(R′)—. In some embodiments, Y is —N(R′)—. In some embodiments, Y is —N(R)—. In some embodiments, Y is —NH—.

[1091] In some embodiments, Y is L. In some embodiments, Y is a covalent bond. In some embodiments, Y is or an optionally substituted, linear or branched C₁-C₁₀ alkylene, wherein one or more methylene units of L are optionally and independently replaced by an optionally substituted C₁-C₆ alkylene, C₁-C₆ alkenylene, —C≡C—, —C(R′)₂—, -Cy-, —O—, —S—, —S—S—, —N(R′)—, —C(O)—, —C(S)—, —C(NR′)—, —C(O)N(R′)—, —N(R′)C(O)N(R′)—, —N(R′)C(O)—, —N(R′)C(O)O—, —OC(O)N(R′)—, —S(O)—, —S(O)₂—, —S(O)₂N(R′)—, —N(R′)S(O)₂—, —SC(O)—, —C(O)S—, —OC(O)—, or —C(O)O—. In some embodiments, Y is an optionally substituted C₁-C₁₀ alkylene or C₁-C₁₀ alkenylene. In some embodiments, Y is methylene.

[1092] In some embodiments, Z is —O—. In some embodiments, Z is —S—.

[1093] In some embodiments, Z is —N(-L-R′)—. In some embodiments, Z is —N(R′)—. In some embodiments, Z is —N(R′)—. In some embodiments, Z is —N(R)—. In some embodiments, Z is —NH—.

[1094] In some embodiments, Z is L. In some embodiments, Z is a covalent bond. In some embodiments, Z is or an optionally substituted, linear or branched C₁-C₁₀ alkylene, wherein one or more methylene units of L are optionally and independently replaced by an optionally substituted C₁-C₆ alkylene, C₁-C₆ alkenylene, —C≡C—, —C(R′)₂—, -Cy-, —O—, —S—, —S—S—, —N(R′)—, —C(O)—, —C(S)—, —C(NR′)—, —C(O)N(R′)—, —N(R′)C(O)N(R′)—, —N(R′)C(O)—, —N(R′)C(O)O—, —OC(O)N(R′)—, —S(O)—, —S(O)₂—, —S(O)₂N(R′)—, —N(R′)S(O)₂—, —SC(O)—, —C(O)S—, —OC(O)—, or —C(O)O—. In some embodiments, Z is an optionally substituted C₁-C₁₀ alkylene or C₁-C₁₀ alkenylene. In some embodiments, Z is methylene.

[1095] In some embodiments, L is a covalent bond or an optionally substituted, linear or branched C₁-C₁₀ alkylene, wherein one or more methylene units of L are optionally and independently replaced by an optionally substituted C₁-C₆ alkylene, C₁-C₆ alkenylene, —C≡C—, —C(R′)₂—, -Cy-, —O—, —S—, —S—S—, —N(R′)—, —C(O)—, —C(S)—, —C(NR′)—, —C(O)N(R′)—, —N(R′)C(O)N(R′)—, —N(R′)C(O)—, —N(R′)C(O)O—, —OC(O)N(R′)—, —S(O)—, —S(O)₂—, —S(O)₂N(R′)—, —N(R′)S(O)₂—, —SC(O)—, —C(O)S—, —OC(O)—, or —C(O)O—.

[1096] In some embodiments, L is a covalent bond. In some embodiments, L is an optionally substituted, linear or branched C₁-C₁₀ alkylene, wherein one or more methylene units of L are optionally and independently replaced by an optionally substituted C₁-C₆ alkylene, C₁-C₆ alkenylene, —C≡C—, —C(R′)₂—, -Cy-, —O—, —S—, —S—S—, —N(R′)—, —C(O)—, —C(S)—, —C(NR′)—, —C(O)N(R′)—, —N(R′)C(O)N(R′)—, —N(R′)C(O)—, —N(R′)C(O)O—, —OC(O)N(R′)—, —S(O)—, —S(O)₂—, —S(O)₂N(R′)—, —N(R′)S(O)₂—, —SC(O)—, —C(O)S—, —OC(O)—, or —C(O)O—.

[1097] In some embodiments, L has the structure of -L¹-V—, wherein:
[1098] L¹ is an optionally substituted group selected from

[chemical structure]

C₁-C₆ alkylene, C₁-C₆ alkenylene, carbocyclylene, arylene, C₁-C₆ heteroalkylene, heterocyclylene, and heteroarylene;
[1099] V is selected from —O—, —S—, —NR′—, C(R′)₂, —S—S—, —B—S—S—C—,

[chemical structure]

or an optionally substituted group selected from C₁-C₆ alkylene, arylene, C₁-C₆ heteroalkylene, heterocyclylene, and heteroarylene;
[1100] A is ═O, ═S, ═NR′, or ═C(R′)₂;
[1101] each of B and C is independently —O—, —S—, —NR′—, —C(R′)₂—, or an optionally substituted group selected from C₁-C₆ alkylene, carbocyclylene, arylene, heterocyclylene, or heteroarylene; and
[1102] each R′ is independently as defined above and described herein.

[1103] In some embodiments, L¹ is

[chemical structure]

[1104] In some embodiments, L¹ is

[chemical structure]

wherein Ring Cy′ is an optionally substituted arylene, carbocyclylene, heteroarylene, or heterocyclylene. In some embodiments, L¹ is optionally substituted

[chemical structure]

In some embodiments, L¹ is

[chemical structure]

[1105] In some embodiments, L¹ is connected to X. In some embodiments, L¹ is an optionally substituted group selected from

[chemical structure]

and the sulfur atom is connect to V. In some embodiments, L¹ is an optionally substituted group selected from

[chemical structure]

and the carbon atom is connect to X.

[1106] In some embodiments, L has the structure of:

[chemical structure]

wherein:
[1107] E is —O—, —S—, —NR′— or —C(R′)₂—;
[1108] [symbol] is a single or double bond;
[1109] the two R^{L1} are taken together with the two carbon atoms to which they are bound to form an optionally substituted aryl, carbocyclic, heteroaryl or heterocyclic ring; and each R′ is independently as defined above and described herein.

[1110] In some embodiments, L has the structure of:

[chemical structure]

wherein:
[1111] G is —O—, —S—, or —NR′;
[1112] [symbol] is a single or double bond; and
[1113] the two R^{L1} are taken together with the two carbon atoms to which they are bound to form an optionally substituted aryl, C₃-C₁₀ carbocyclic, heteroaryl or heterocyclic ring.

[1114] In some embodiments, L has the structure of:

[chemical structure]

wherein:
[1115] E is —O—, —S—, —NR′— or —C(R′)₂—;
[1116] D is ═N—, ═C(F)—, ═C(Cl)—, ═C(Br)—, ═C(I)—, ═C(CN)—, ═C(NO₂)—, ═C(CO₂—(C₁-C₆ aliphatic))-, or ═C(CF₃)—; and
[1117] each R′ is independently as defined above and described herein.

[1118] In some embodiments, L has the structure of:

[chemical structure]

wherein:
[1119] G is —O—, —S—, or —NR′;
[1120] D is ═N—, ═C(F)—, ═C(Cl)—, ═C(Br)—, ═C(I)—, ═C(CN)—, ═C(NO₂)—, ═C(CO₂—(C₁-C₆ aliphatic))-, or ═C(CF₃)—.

[1121] In some embodiments, L has the structure of:

[chemical structure]

wherein:
[1122] E is —O—, —S—, —NR′— or —C(R′)₂—;
[1123] D is ═N—, ═C(F)—, ═C(Cl)—, ═C(Br)—, ═C(I)—, ═C(CN)—, ═C(NO₂)—, ═C(CO₂—(C₁-C₆ aliphatic))-, or ═C(CF₃)—; and
[1124] each R′ is independently as defined above and described herein.

[1125] In some embodiments, L has the structure of:

[chemical structure]

wherein:
[1126] G is —O—, —S—, or —NR′;
[1127] D is ═N—, ═C(F)—, ═C(Cl)—, ═C(Br)—, ═C(I)—, ═C(CN)—, ═C(NO₂)—, ═C(CO₂—(C₁-C₆ aliphatic))-, or ═C(CF₃)—.

[1128] In some embodiments, L has the structure of:

[chemical structure]

wherein:
[1129] E is —O—, —S—, —NR′— or —C(R′)₂—;
[1130] [symbol] is a single or double bond;
[1131] the two R^{L1} are taken together with the two carbon atoms to which they are bound to form an optionally substituted aryl, C₃-C₁₀ carbocyclic, heteroaryl or heterocyclic ring;
[1132] and each R′ is independently as defined above and described herein.

[1133] In some embodiments, L has the structure of:

[chemical structure]

wherein:
[1134] G is —O—, —S—, or —NR′;
[1135] [symbol] is a single or double bond;
[1136] the two R^{L1} are taken together with the two carbon atoms to which they are bound to form an optionally substituted aryl, C₃-C₁₀ carbocyclic, heteroaryl or heterocyclic ring;
[1137] and each R′ is independently as defined above and described herein.

[1138] In some embodiments, L has the structure of:

[chemical structure]

wherein:
[1139] E is —O—, —S—, —NR′— or —C(R′)₂—;
[1140] D is ═N—, ═C(F)—, ═C(Cl)—, ═C(Br)—, ═C(I)—, ═C(CN)—, ═C(NO₂)—, ═C(CO₂—(C₁-C₆ aliphatic))-, or ═C(CF₃)—; and
[1141] each R′ is independently as defined above and described herein.

[1142] In some embodiments, L has the structure of:

[chemical structure]

wherein:
[1143] G is —O—, —S—, or —NR′;
[1144] D is ═N—, ═C(F)—, ═C(Cl)—, ═C(Br)—, ═C(I)—, ═C(CN)—, ═C(NO₂)—, ═C(CO₂—(C₁-C₆ aliphatic))-, or ═C(CF₃)—; and
[1145] each R′ is independently as defined above and described herein.

[1146] In some embodiments, L has the structure of:

[chemical structure]

wherein:
[1147] E is —O—, —S—, —NR′— or —C(R′)₂—;
[1148] D is ═N—, ═C(F)—, ═C(Cl)—, ═C(Br)—, ═C(I)—, ═C(CN)—, ═C(NO₂)—, ═C(CO₂—(C₁-C₆ aliphatic))-, or ═C(CF₃)—; and
[1149] each R′ is independently as defined above and described herein.

[1150] In some embodiments, L has the structure of:

[chemical structure]

wherein:
[1151] G is —O—, —S—, or —NR′;
[1152] D is ═N—, ═C(F)—, ═C(Cl)—, ═C(Br)—, ═C(I)—, ═C(CN)—, ═C(NO₂)—, ═C(CO₂—(C₁-C₆ aliphatic))-, or ═C(CF₃)—; and
[1153] each R′ is independently as defined above and described herein.

[1154] In some embodiments, L has the structure of:

[chemical structure]

wherein:
[1155] E is —O—, —S—, —NR′— or —C(R′)₂—;
[1156] [symbol] is a single or double bond;
[1157] the two R^{L1} are taken together with the two carbon atoms to which they are bound to form an optionally substituted aryl, C₃-C₁₀ carbocyclic, heteroaryl or heterocyclic ring; and each R′ is independently as defined above and described herein.

[1158] In some embodiments, L has the structure of:

[chemical structure]

wherein:
[1159] G is —O—, —S—, or —NR′;
[1160] [symbol] is a single or double bond;
[1161] the two R^{L1} are taken together with the two carbon atoms to which they are bound to form an optionally substituted aryl, C₃-C₁₀ carbocyclic, heteroaryl or heterocyclic ring; and each R′ is independently as defined above and described herein.

[1162] In some embodiments, L has the structure of:

[chemical structure]

wherein:
[1163] E is —O—, —S—, —NR′— or —C(R′)₂—;
[1164] D is ═N—, ═C(F)—, ═C(Cl)—, ═C(Br)—, ═C(I)—, ═C(CN)—, ═C(NO₂)—, ═C(CO₂—(C₁-C₆ aliphatic))-, or ═C(CF₃)—; and
[1165] each R′ is independently as defined above and described herein.

[1166] In some embodiments, L has the structure of:

[chemical structure]

wherein:
[1167] G is —O—, —S—, or —NR′;
[1168] D is ═N—, ═C(F)—, ═C(Cl)—, ═C(Br)—, ═C(I)—, ═C(CN)—, ═C(NO₂)—, ═C(CO₂—(C₁-C₆ aliphatic))-, or ═C(CF₃)—; and
[1169] R′ is as defined above and described herein.

[1170] In some embodiments, L has the structure of:

[chemical structure]

wherein:
[1171] E is —O—, —S—, —NR′— or —C(R′)₂—;
[1172] D is ═N—, ═C(F)—, ═C(Cl)—, ═C(Br)—, ═C(I)—, ═C(CN)—, ═C(NO₂)—, ═C(CO₂—(C₁-C₆ aliphatic))-, or ═C(CF₃)—; and
[1173] each R′ is independently as defined above and described herein.

[1174] In some embodiments, L has the structure of:

[chemical structure]

wherein:
[1175] G is —O—, —S—, or —NR′;
[1176] D is ═N—, ═C(F)—, ═C(Cl)—, ═C(Br)—, ═C(I)—, ═C(CN)—, ═C(NO₂)—, ═C(CO₂—(C₁-C₆ aliphatic))-, or ═C(CF₃)—; and
[1177] R′ is as defined above and described herein.

[1178] In some embodiments, L has the structure of:

[chemical structure]

wherein the phenyl ring is optionally substituted. In some embodiments, the phenyl ring is not substituted. In some embodiments, the phenyl ring is substituted.

[1179] In some embodiments, L has the structure of:

[chemical structure]

wherein the phenyl ring is optionally substituted. In some embodiments, the phenyl ring is not substituted. In some embodiments, the phenyl ring is substituted.

[1180] In some embodiments, L has the structure of:

[chemical structure]

wherein:
[1181] [symbol] is a single or double bond; and
[1182] the two R^{L1} are taken together with the two carbon atoms to which they are bound to form an optionally substituted aryl, C₃-C₁₀ carbocyclic, heteroaryl or heterocyclic ring.

[1183] In some embodiments, L has the structure of:

[chemical structure]

wherein:
[1184] G is —O—, —S—, or —NR′;
[1185] [symbol] is a single or double bond; and
[1186] the two R^{L1} are taken together with the two carbon atoms to which they are bound to form an optionally substituted aryl, C₃-C₁₀ carbocyclic, heteroaryl or heterocyclic ring.

[1187] In some embodiments, E is —O—, —S—, —NR′— or —C(R′)₂—, wherein each R′ independently as defined above and described herein. In some embodiments, E is —O—, —S—, or —NR′—. In some embodiments, E is —O—, —S—, or —NH—. In some embodiments, E is —O—. In some embodiments, E is —S—. In some embodiments, E is —NH—.

[1188] In some embodiments, G is —O—, —S—, or —NR′, wherein each R′ independently as defined above and described herein. In some embodiments, G is —O—, —S—, or —NH—. In some embodiments, G is —O—. In some embodiments, G is —S—. In some embodiments, G is —NH—.

[1189] In some embodiments, L is -L³-G-, wherein:
[1190] L³ is an optionally substituted C₁-C₅ alkylene or alkenylene, wherein one or more methylene units are optionally and independently replaced by —O—, —S—,—N(R′)—, —C(O)—, —C(S)—, —C(NR′)—, —S(O)—, —S(O)₂—, or

[chemical structure]

and
wherein each of G, R′ and Ring Cy′ is independently as defined above and described herein.

[1191] In some embodiments, L is -L³-S—, wherein L³ is as defined above and described herein. In some embodiments, L is -L³-O—, wherein L³ is as defined above and described herein. In some embodiments, L is -L³-N(R′)—, wherein each of L³ and R′ is independently as defined above and described herein. In some embodiments, L is -L³-NH—, wherein each of L³ and R′ is independently as defined above and described herein.

[1192] In some embodiments, L³ is an optionally substituted C₅ alkylene or alkenylene, wherein one or more methylene units are optionally and independently replaced by —O—, —S—, —N(R′)—, —C(O)—, —C(S)—, —C(NR′)—, —S(O)—, —S(O)₂—, or

[chemical structure]

and each of R′ and Ring Cy′ is independently as defined above and described herein. In some embodiments, L³ is an optionally substituted C₅ alkylene. In some embodiments, -L³-G- is

[chemical structure]

[1193] In some embodiments, L³ is an optionally substituted C₄ alkylene or alkenylene, wherein one or more methylene units are optionally and independently replaced by —O—, —S—, —N(R′)—, —C(O)—, —C(S)—, —C(NR′)—, —S(O)—, —S(O)₂—, or

[chemical structure]

and each of R′ and Cy′ is independently as defined above and described herein.

[1194] In some embodiments, -L³-G- is

[chemical structure]

[1195] In some embodiments, L³ is an optionally substituted C₃ alkylene or alkenylene, wherein one or more methylene units are optionally and independently replaced by —O—, —S—, —N(R′)—, —C(O)—, —C(S)—, —C(NR′)—, —S(O)—, —S(O)₂—, or

[chemical structure]

and each of R′ and Cy′ is independently as defined above and described herein.

[1196] In some embodiments, -L³-G- is

[chemical structure]

[1197] In some embodiments, L is

[chemical structure]

In some embodiments, L is

[chemical structure]

In some embodiments, L is

[chemical structure]

[1198] In some embodiments, L³ is an optionally substituted C₂ alkylene or alkenylene, wherein one or more methylene units are optionally and independently replaced by —O—, —S—, —N(R′)—, —C(O)—, —C(S)—, —C(NR′)—, —S(O)—, —S(O)₂—, or

[chemical structure]

and each of R′ and Cy′ is independently as defined above and described herein.

[1199] In some embodiments, -L³-G- is

[chemical structure]

wherein each of G and Cy′ is independently as defined above and described herein. In some embodiments, L is

[chemical structure]

[1200] In some embodiments, L is -L⁴-G-, wherein L⁴ is an optionally substituted C₁-C₂ alkylene; and G is as defined above and described herein. In some embodiments, L is -L⁴-G-, wherein L⁴ is an optionally substituted C₁-C₂ alkylene; G is as defined above and described herein; and G is connected to R². In some embodiments, L is -L⁴-G-, wherein L⁴ is an optionally substituted methylene; G is as defined above and described herein; and G is connected to R². In some embodiments, L is -L⁴-G-, wherein L⁴ is methylene; G is as defined above and described herein; and G is connected to R². In some embodiments, L is -L⁴-G-, wherein L⁴ is an optionally substituted —(CH₂)₂—; G is as defined above and described herein; and G is connected to R². In some embodiments, L is -L⁴-G-, wherein L⁴ is —(CH₂)₂—; G is as defined above and described herein; and G is connected to R¹.

[1201] In some embodiments, L is

[chemical structure]

wherein G is as defined above and described herein, and G is connected to R¹. In some embodiments, L is

[chemical structure]

wherein G is as defined above and described herein, and G is connected to R¹. In some embodiments, L is

[chemical structure]

wherein G is as defined above and described herein, and G is connected to R¹. In some embodiments, L is

[chemical structure]

wherein the sulfur atom is connected to R¹. In some embodiments, L is

[chemical structure]

wherein the oxygen atom is connected to R¹.

[1202] In some embodiments, L is

[chemical structure]

wherein G is as defined above and described herein.

[1203] In some embodiments, L is —S—R^{L3}— or —S—C(O)—R^{L3}—, wherein R^{L3} is an optionally substituted, linear or branched, C₁-C₉ alkylene, wherein one or more methylene units are optionally and independently replaced by an optionally substituted C₁-C₆ alkylene, C₁-C₆ alkenylene, —C≡C—, —C(R′)₂—, -Cy-, —O—, —S—, —S—S—, —N(R′)—, —C(O)—, —C(S)—, —C(NR′)—, —C(O)N(R′)—, —N(R′)C(O)N(R′)—, —N(R′)C(O)—, —N(R′)C(O)O—, —OC(O)N(R′)—, —S(O)—, —S(O)₂—, —S(O)₂N(R′)—, —N(R′)S(O)₂—, —SC(O)—, —C(O)S—, —OC(O)—, or —C(O)O—, wherein each of R′ and -Cy- is independently as defined above and described herein. In some embodiments, L is —S—R^{L3}— or —S—C(O)—R^{L3}—, wherein R^{L3} is an optionally substituted C₁-C₆ alkylene. In some embodiments, L is —S—R^{L3}— or —S—C(O)—R^{L3}—, wherein R^{L3} is an optionally substituted C₁-C₆ alkenylene. In some embodiments, L is —S—R^{L3}— or —S—C(O)—R^{L3}—, wherein R^{L3} is an optionally substituted C₁-C₆ alkylene wherein one or more methylene units are optionally and independently replaced by an optionally substituted C₁-C₆ alkenylene, arylene, or heteroarylene. In some embodiments, R^{L3} is an optionally substituted —S—(C₁-C₆ alkenylene)-, —S—(C₁-C₆ alkylene)-, —S—(C₁-C₆ alkylene)-arylene-(C₁-C₆ alkylene)-, —S—CO-arylene-(C₁-C₆ alkylene)-, or —S—CO—(C₁-C₆ alkylene)-arylene-(C₁-C₆ alkylene)-.

[1204] In some embodiments, L is

[chemical structure]

[1205] In some embodiments, L is

[chemical structure]

In some embodiments, L is

[chemical structure]

In some embodiments,

[chemical structure]

[1206] In some embodiments, the sulfur atom in the L embodiments described above and herein is connected to X. In some embodiments, the sulfur atom in the L embodiments described above and herein is connected to R¹.

[1207] In some embodiments, R¹ is halogen, R, or an optionally substituted C₁-C₅₀ aliphatic wherein one or more methylene units are optionally and independently replaced by an optionally substituted C₁-C₆ alkylene, C₁-C₆ alkenylene, —C≡C—, —C(R′)₂—, -Cy-, —O—, —S—, —S—S—, —N(R′)—, —C(O)—, —C(S)—, —C(NR′)—, —C(O)N(R′)—, —N(R′)C(O)N(R′)—, —N(R′)C(O)—, —N(R′)C(O)O—, —OC(O)N(R′)—, —S(O)—, —S(O)₂—, —S(O)₂N(R′)—, —N(R′)S(O)₂—, —SC(O)—, —C(O)S—, —OC(O)—, or —C(O)O—, wherein each variable is independently as defined above and described herein. In some embodiments, R¹ is halogen, R, or an optionally substituted C₁-C₁₀ aliphatic wherein one or more methylene units are optionally and independently replaced by an optionally substituted C₁-C₆ alkylene, C₁-C₆ alkenylene, —C≡C—, —C(R′)₂—, -Cy-, —O—, —S—, —S—S—, —N(R′)—, —C(O)—, —C(S)—, —C(NR′)—, —C(O)N(R′)—, —N(R′)C(O)N(R′)—, —N(R′)C(O)—, —N(R′)C(O)O—, —OC(O)N(R′)—, —S(O)—, —S(O)₂—, —S(O)₂N(R′)—, —N(R′)S(O)₂—, —SC(O)—, —C(O)S—, —OC(O)—, or —C(O)O—, wherein each variable is independently as defined above and described herein.

[1208] In some embodiments, R¹ is hydrogen. In some embodiments, R¹ is halogen. In some embodiments, R¹ is —F. In some embodiments, R¹ is —Cl. In some embodiments, R¹ is —Br. In some embodiments, R¹ is —I.

[1209] In some embodiments, R¹ is R wherein R is as defined above and described herein.

[1210] In some embodiments, R¹ is hydrogen. In some embodiments, R¹ is an optionally substituted group selected from C₁-C₅₀ aliphatic, phenyl, carbocyclyl, aryl, heteroaryl, or heterocyclyl.

[1211] In some embodiments, R¹ is an optionally substituted C₁-C₅₀ aliphatic. In some embodiments, R¹ is an optionally substituted C₁-C₁₀ aliphatic. In some embodiments, R¹ is an optionally substituted C₁-C₆ aliphatic. In some embodiments, R¹ is an optionally substituted C₁-C₆ alkyl. In some embodiments, R¹ is optionally substituted, linear or branched hexyl. In some embodiments, R¹ is optionally substituted, linear or branched pentyl. In some embodiments, R¹ is optionally substituted, linear or branched butyl. In some embodiments, R¹ is optionally substituted, linear or branched propyl. In some embodiments, R¹ is optionally substituted ethyl. In some embodiments, R¹ is optionally substituted methyl.

[1212] In some embodiments, R¹ is optionally substituted phenyl. In some embodiments, R¹ is substituted phenyl. In some embodiments, R¹ is phenyl.

[1213] In some embodiments, R¹ is optionally substituted carbocyclyl. In some embodiments, R¹ is optionally substituted C₃-C₁₀ carbocyclyl. In some embodiments, R¹ is optionally substituted monocyclic carbocyclyl. In some embodiments, R¹ is optionally substituted cycloheptyl. In some embodiments, R¹ is optionally substituted cyclohexyl. In some embodiments, R¹ is optionally substituted cyclopentyl. In some embodiments, R¹ is optionally substituted cyclobutyl. In some embodiments, R¹ is an optionally substituted cyclopropyl. In some embodiments, R¹ is optionally substituted bicyclic carbocyclyl.

[1214] In some embodiments, R¹ is an optionally substituted C₁-C₅₀ polycyclic hydrocarbon. In some embodiments, R¹ is an optionally substituted C₁-C₅₀ polycyclic hydrocarbon wherein one or more methylene units are optionally and independently replaced by an optionally substituted C₁-C₆ alkylene, C₁-C₆ alkenylene, —C≡C—, —C(R′)₂—, -Cy-, —O—, —S—, —S—S—, —N(R′)—, —C(O)—, —C(S)—, —C(NR′)—, —C(O)N(R′)—, —N(R′)C(O)N(R′)—, —N(R′)C(O)—, —N(R′)C(O)O—, —OC(O)N(R′)—, —S(O)—, —S(O)₂—, —S(O)₂N(R′)—, —N(R′)S(O)₂—, —SC(O)—, —C(O)S—, —OC(O)—, or —C(O)O—, wherein each variable is independently as defined above and described herein. In some embodiments, R¹ is optionally substituted

[chemical structure]

In some embodiments, R¹ is

[chemical structure]

In some embodiments, R¹ is optionally substituted

[chemical structure]

[1215] In some embodiments, R¹ is an optionally substituted C₁-C₅₀ aliphatic comprising one or more optionally substituted polycyclic hydrocarbon moieties. In some embodiments, R¹ is an optionally substituted C₁-C₅₀ aliphatic comprising one or more optionally substituted polycyclic hydrocarbon moieties, wherein one or more methylene units are optionally and independently replaced by an optionally substituted C₁-C₆ alkylene, C₁-C₆ alkenylene, —C≡C—, —C(R′)₂—, -Cy-, —O—, —S—, —S—S—, —N(R′)—, —C(O)—, —C(S)—, —C(NR′)—, —C(O)N(R′)—, —N(R′)C(O)N(R′)—, —N(R′)C(O)—, —N(R′)C(O)O—, —OC(O)N(R′)—, —S(O)—, —S(O)₂—, —S(O)₂N(R′)—, —N(R′)S(O)₂—, —SC(O)—, —C(O)S—, —OC(O)—, or —C(O)O—, wherein each variable is independently as defined above and described herein. In some embodiments, R¹ is an optionally substituted C₁-C₅₀ aliphatic comprising one or more optionally substituted

[chemical structure]

In some embodiments, R¹ is

[chemical structure]

In some embodiments R¹ is

[chemical structure]

In some embodiments, R¹ is

[chemical structure]

In some embodiments, R¹ is

[chemical structure]

In some embodiments, R¹ is

[chemical structure]

[1216] In some embodiments, R¹ is an optionally substituted aryl. In some embodiments, R¹ is an optionally substituted bicyclic aryl ring.

[1217] In some embodiments, R¹ is an optionally substituted heteroaryl. In some embodiments, R¹ is an optionally substituted 5-6 membered monocyclic heteroaryl ring having 1-3 heteroatoms independently selected from nitrogen, sulfur, or oxygen. In some embodiments, R¹ is a substituted 5-6 membered monocyclic heteroaryl ring having 1-3 heteroatoms independently selected from nitrogen, oxygen, or sulfur. In some embodiments, R¹ is an unsubstituted 5-6 membered monocyclic heteroaryl ring having 1-3 heteroatoms independently selected from nitrogen, sulfur, or oxygen.

[1218] In some embodiments, R¹ is an optionally substituted 5 membered monocyclic heteroaryl ring having 1-3 heteroatoms independently selected from nitrogen, oxygen or sulfur. In some embodiments, R¹ is an optionally substituted 6 membered monocyclic heteroaryl ring having 1-3 heteroatoms independently selected from nitrogen, oxygen, or sulfur.

[1219] In some embodiments, R¹ is an optionally substituted 5-membered monocyclic heteroaryl ring having 1 heteroatom selected from nitrogen, oxygen, or sulfur. In some embodiments, R¹ is selected from pyrrolyl, furanyl, or thienyl.

[1220] In some embodiments, R¹ is an optionally substituted 5-membered heteroaryl ring having 2 heteroatoms independently selected from nitrogen, oxygen, or sulfur. In certain embodiments, R¹ is an optionally substituted 5-membered heteroaryl ring having 1 nitrogen atom, and an additional heteroatom selected from sulfur or oxygen. Example R¹ groups include optionally substituted pyrazolyl, imidazolyl, thiazolyl, isothiazolyl, oxazolyl or isoxazolyl.

[1221] In some embodiments, R¹ is a 6-membered heteroaryl ring having 1-3 nitrogen atoms. In other embodiments, R¹ is an optionally substituted 6-membered heteroaryl ring having 1-2 nitrogen atoms. In some embodiments, R¹ is an optionally substituted 6-membered heteroaryl ring having 2 nitrogen atoms. In certain embodiments, R¹ is an optionally substituted 6-membered heteroaryl ring having 1 nitrogen. Example R¹ groups include optionally substituted pyridinyl, pyrimidinyl, pyrazinyl, pyridazinyl, triazinyl, or tetrazinyl.

[1222] In certain embodiments, R¹ is an optionally substituted 8-10 membered bicyclic heteroaryl ring having 1-4 heteroatoms independently selected from nitrogen, oxygen, or sulfur. In some embodiments, R¹ is an optionally substituted 5,6-fused heteroaryl ring having 1-4 heteroatoms independently selected from nitrogen, oxygen, or sulfur. In other embodiments, R¹ is an optionally substituted 5,6-fused heteroaryl ring having 1-2 heteroatoms independently selected from nitrogen, oxygen, or sulfur. In certain embodiments, R¹ is an optionally substituted 5,6-fused heteroaryl ring having 1 heteroatom independently selected from nitrogen, oxygen, or sulfur. In some embodiments, R¹ is an optionally substituted indolyl. In some embodiments, R¹ is an optionally substituted azabicyclo[3.2.1]octanyl. In certain embodiments, R¹ is an optionally substituted 5,6-fused heteroaryl ring having 2 heteroatoms independently selected from nitrogen, oxygen, or sulfur. In some embodiments, R¹ is an optionally substituted azaindolyl. In some embodiments, R¹ is an optionally substituted benzimidazolyl. In some embodiments, R¹ is an optionally substituted benzothiazolyl. In some embodiments, R¹ is an optionally substituted benzoxazolyl. In some embodiments, R¹ is an optionally substituted indazolyl. In certain embodiments, R¹ is an optionally substituted 5,6-fused heteroaryl ring having 3 heteroatoms independently selected from nitrogen, oxygen, or sulfur.

[1223] In certain embodiments, R¹ is an optionally substituted 6,6-fused heteroaryl ring having 1-4 heteroatoms independently selected from nitrogen, oxygen, or sulfur. In some embodiments, R¹ is an optionally substituted 6,6-fused heteroaryl ring having 1-2 heteroatoms independently selected from nitrogen, oxygen, or sulfur. In other embodiments, R¹ is an optionally substituted 6,6-fused heteroaryl ring having 1 heteroatom independently selected from nitrogen, oxygen, or sulfur. In some embodiments, R¹ is an optionally substituted quinolinyl. In some embodiments, R¹ is an optionally substituted isoquinolinyl. According to one aspect, R¹ is an optionally substituted 6,6-fused heteroaryl ring having 2 heteroatoms independently selected from nitrogen, oxygen, or sulfur. In some embodiments, R¹ is a quinazoline or a quinoxaline.

[1224] In some embodiments, R¹ is an optionally substituted heterocyclyl. In some embodiments, R¹ is an optionally substituted 3-7 membered saturated or partially unsaturated heterocyclic ring having 1-2 heteroatoms independently selected from nitrogen, oxygen, or sulfur. In some embodiments, R¹ is a substituted 3-7 membered saturated or partially unsaturated heterocyclic ring having 1-2 heteroatoms independently selected from nitrogen, oxygen, or sulfur. In some embodiments, R¹ is an unsubstituted 3-7 membered saturated or partially unsaturated heterocyclic ring having 1-2 heteroatoms independently selected from nitrogen, oxygen, or sulfur.

[1225] In some embodiments, R¹ is an optionally substituted heterocyclyl. In some embodiments, R¹ is an optionally substituted 6 membered saturated or partially unsaturated heterocyclic ring having 1-2 heteroatoms independently selected from nitrogen, oxygen, or sulfur. In some embodiments, R¹ is an optionally substituted 6 membered partially unsaturated heterocyclic ring having 2 heteroatoms independently selected from nitrogen, oxygen, or sulfur. In some embodiments, R¹ is an optionally substituted 6 membered partially unsaturated heterocyclic ring having 2 oxygen atoms.

[1226] In certain embodiments, R¹ is a 3-7 membered saturated or partially unsaturated heterocyclic ring having 1-2 heteroatoms independently selected from nitrogen, oxygen, or sulfur. In certain embodiments, R¹ is oxiranyl, oxetanyl, tetrahydrofuranyl, tetrahydropyranyl, oxepaneyl, aziridineyl, azetidineyl, pyrrolidinyl, piperidinyl, azepanyl, thiiranyl, thietanyl, tetrahydrothiophenyl, tetrahydrothiopyranyl, thiepanyl, dioxolanyl, oxathiolanyl, oxazolidinyl, imidazolidinyl, thiazolidinyl, dithiolanyl, dioxanyl, morpholinyl, oxathianyl, piperazinyl, thiomorpholinyl, dithianyl, dioxepanyl, oxazepanyl, oxathiepanyl, dithiepanyl, diazepanyl, dihydrofuranonyl, tetrahydropyranonyl, oxepanonyl, pyrolidinonyl, piperidinonyl, azepanonyl, dihydrothiophenonyl, tetrahydrothiopyranonyl, thiepanonyl, oxazolidinonyl, oxazinanonyl, oxazepanonyl, dioxolanonyl, dioxanonyl, dioxepanonyl, oxathiolinonyl, oxathianonyl, oxathiepanonyl, thiazolidinonyl, thiazinanonyl, thiazepanonyl, imidazolidinonyl, tetrahydropyrimidinonyl, diazepanonyl, imidazolidinedionyl, oxazolidinedionyl, thiazolidinedionyl, dioxolanedionyl, oxathiolanedionyl, piperazinedionyl, morpholinedionyl, thiomorpholinedionyl, tetrahydropyranyl, tetrahydrofuranyl, morpholinyl, thiomorpholinyl, piperidinyl, piperazinyl, pyrrolidinyl, tetrahydrothiophenyl, or tetrahydrothiopyranyl. In some embodiments, R¹ is an optionally substituted 5 membered saturated or partially unsaturated heterocyclic ring having 1-2 heteroatoms independently selected from nitrogen, oxygen, or sulfur.

[1227] In certain embodiments, R¹ is an optionally substituted 5-6 membered partially unsaturated monocyclic ring having 1-2 heteroatoms independently selected from nitrogen, oxygen, or sulfur. In certain embodiments, R¹ is an optionally substituted tetrahydropyridinyl, dihydrothiazolyl, dihydrooxazolyl, or oxazolinyl group.

[1228] In some embodiments, R¹ is an optionally substituted 8-10 membered bicyclic saturated or partially unsaturated heterocyclic ring having 1-4 heteroatoms independently selected from nitrogen, oxygen, or sulfur. In some embodiments, R¹ is an optionally substituted indolinyl. In some embodiments, R¹ is an optionally substituted isoindolinyl. In some embodiments, R¹ is an optionally substituted 1, 2, 3, 4-tetrahydroquinoline. In some embodiments, R¹ is an optionally substituted 1, 2, 3, 4-tetrahydroisoquinoline.

[1229] In some embodiments, R¹ is an optionally substituted C₁-C₁₀ aliphatic wherein one or more methylene units are optionally and independently replaced by an optionally substituted C₁-C₆ alkylene, C₁-C₆ alkenylene, —C≡C—, —C(R′)₂—, -Cy-, —O—, —S—, —S—S—, —N(R′)—, —C(O)—, —C(S)—, —C(NR′)—, —C(O)N(R′)—, —N(R′)C(O)N(R′)—, —N(R′)C(O)—, —N(R′)C(O)O—, —OC(O)N(R′)—, —S(O)—, —S(O)₂—, —S(O)₂N(R′)—, —N(R′)S(O)₂—, —SC(O)—, —C(O)S—, —OC(O)—, or —C(O)O—, wherein each variable is independently as defined above and described herein. In some embodiments, R¹ is an optionally substituted C₁-C₁₀ aliphatic wherein one or more methylene units are optionally and independently replaced by an optionally -Cy-, —O—, —S—, —S—S—, —N(R′)—, —C(O)—, —C(S)—, —C(NR′)—, —C(O)N(R′)—, —N(R′)C(O)N(R′)—, —N(R′)C(O)—, —N(R′)C(O)O—, —OC(O)N(R′)—, —S(O)—, —S(O)₂—, —S(O)₂N(R′)—, —N(R′)S(O)₂—, —OC(O)—, or —C(O)O—, wherein each R′ is independently as defined above and described herein. In some embodiments, R¹ is an optionally substituted C₁-C₁₀ aliphatic wherein one or more methylene units are optionally and independently replaced by an optionally -Cy-, —O—, —S—, —S—S—, —N(R′)—, —C(O)—, —OC(O)—, or —C(O)O—, wherein each R′ is independently as defined above and described herein.

[1230] In some embodiments, R¹ is

[chemical structure]

[chemical structure]

[chemical structure]

[chemical structure]

[chemical structure]

[1231] In some embodiments, R¹ is

[chemical structure]

[1232] In some embodiments, R¹ comprises a terminal optionally substituted —(CH₂)₂— moiety which is connected to L. Example such R¹ groups are depicted below:

[chemical structure]

[1233] In some embodiments, R¹ comprises a terminal optionally substituted —(CH₂)— moiety which is connected to L. Exemplary such R¹ groups are depicted below:

[chemical structure]

[1234] In some embodiments, R¹ is —S—R^{L2}, wherein R^{L2} is an optionally substituted C₁-C₉ aliphatic wherein one or more methylene units are optionally and independently replaced by an optionally substituted C₁-C₆ alkylene, C₁-C₆ alkenylene, —C≡C—, —C(R′)₂—, -Cy-, —O—, —S—, —S—S—, —N(R′)—, —C(O)—, —C(S)—, —C(NR′)—, —C(O)N(R′)—, —N(R′)C(O)N(R′)—, —N(R′)C(O)—, —N(R′)C(O)O—, —OC(O)N(R′)—, —S(O)—, —S(O)₂—, —S(O)₂N(R′)—, —N(R′)S(O)₂—, —SC(O)—, —C(O)S—, —OC(O)—, or —C(O)O—, and each of R′ and -Cy- is independently as defined above and described herein. In some embodiments, R¹ is —S—R^{L2}, wherein the sulfur atom is connected with the sulfur atom in L group.

[1235] In some embodiments, R¹ is —C(O)—R^{L2}, wherein R^{L2} is an optionally substituted C₁-C₉ aliphatic wherein one or more methylene units are optionally and independently replaced by an optionally substituted C₁-C₆ alkylene, C₁-C₆ alkenylene, —C≡C—, —C(R′)₂—, -Cy-, —O—, —S—, —S—S—, —N(R′)—, —C(O)—, —C(S)—, —C(NR′)—, —C(O)N(R′)—, —N(R′)C(O)N(R′)—, —N(R′)C(O)—, —N(R′)C(O)O—, —OC(O)N(R′)—, —S(O)—, —S(O)₂—, —S(O)₂N(R′)—, —N(R′)S(O)₂—, —SC(O)—, —C(O)S—, —OC(O)—, or —C(O)O—, and each of R′ and -Cy- is independently as defined above and described herein. In some embodiments, R¹ is —C(O)—R^{L2}, wherein the carbonyl group is connected with G in L group. In some embodiments, R¹ is —C(O)—R^{L2}, wherein the carbonyl group is connected with the sulfur atom in L group.

[1236] In some embodiments, R^{L2} is optionally substituted C₁-C₉ aliphatic. In some embodiments, R^{L2} is optionally substituted C₁-C₉ alkyl. In some embodiments, R^{L2} is optionally substituted C₁-C₉ alkenyl. In some embodiments, R^{L2} is optionally substituted C₁-C₉ alkynyl. In some embodiments, R^{L2} is an optionally substituted C₁-C₉ aliphatic wherein one or more methylene units are optionally and independently replaced by -Cy- or —C(O)—. In some embodiments, R^{L2} is an optionally substituted C₁-C₉ aliphatic wherein one or more methylene units are optionally and independently replaced by -Cy-. In some embodiments, R^{L2} is an optionally substituted C₁-C₉ aliphatic wherein one or more methylene units are optionally and independently replaced by an optionally substituted heterocyclylene. In some embodiments, R^{L2} is an optionally substituted C₁-C₉ aliphatic wherein one or more methylene units are optionally and independently replaced by an optionally substituted arylene. In some embodiments, R^{L2} is an optionally substituted C₁-C₉ aliphatic wherein one or more methylene units are optionally and independently replaced by an optionally substituted heteroarylene. In some embodiments, R^{L2} is an optionally substituted C₁-C₉ aliphatic wherein one or more methylene units are optionally and independently replaced by an optionally substituted C₃-C₁₀ carbocyclylene. In some embodiments, R^{L2} is an optionally substituted C₁-C₉ aliphatic wherein two methylene units are optionally and independently replaced by -Cy- or —C(O)—. In some embodiments, R^{L2} is an optionally substituted C₁-C₉ aliphatic wherein two methylene units are optionally and independently replaced by -Cy- or —C(O)—. Example R^{L2} groups are depicted below:

[chemical structure]

[1237] In some embodiments, R¹ is hydrogen, or an optionally substituted group selected from

[chemical structure]

—S—(C₁-C₁₀ aliphatic), C₁-C₁₀ aliphatic, aryl, C₁-C₆ heteroalkyl, heteroaryl and heterocyclyl. In some embodiments, R¹ is

[chemical structure]

or —S—(C₁-C₁₀ aliphatic). In some embodiments, R¹ is

[chemical structure]

[1238] In some embodiments, R¹ is an optionally substituted group selected from —S—(C₁-C₆ aliphatic), C₁-C₁₀ aliphatic, C₁-C₆ heteroaliphatic, aryl, heterocyclyl and heteroaryl.

[1239] In some embodiments, R¹ is

[chemical structure]

[1240] In some embodiments, the sulfur atom in the R¹ embodiments described above and herein is connected with the sulfur atom, G, E, or —C(O)— moiety in the L embodiments described above and herein. In some embodiments, the —C(O)— moiety in the R¹ embodiments described above and herein is connected with the sulfur atom, G, E, or —C(O)— moiety in the L embodiments described above and herein.

[1241] In some embodiments, -L-R¹ is any combination of the L embodiments and R¹ embodiments described above and herein.

[1242] In some embodiments, -L-R¹ is -L³-G-R¹ wherein each variable is independently as defined above and described herein.

[1243] In some embodiments, -L-R¹ is -L⁴-G-R¹ wherein each variable is independently as defined above and described herein.

[1244] In some embodiments, -L-R¹ is -L³-G-S—R^{L2}, wherein each variable is independently as defined above and described herein.

[1245] In some embodiments, -L-R¹ is -L³-G-C(O)—R^{L2}, wherein each variable is independently as defined above and described herein.

[1246] In some embodiments, -L-R¹ is

[chemical structure]

wherein R^{L2} is an optionally substituted C₁-C₉ aliphatic wherein one or more methylene units are optionally and independently replaced by an optionally substituted C₁-C₆ alkylene, C₁-C₆ alkenylene, —C≡C—, —C(R′)₂—, -Cy-, —O—, —S—, —S—S—, —N(R′)—, —C(O)—, —C(S)—, —C(NR′)—, —C(O)N(R′)—, —N(R′)C(O)N(R′)—, —N(R′)C(O)—, —N(R′)C(O)O—, —OC(O)N(R′)—, —S(O)—, —S(O)₂—, —S(O)₂N(R′)—, —N(R′)S(O)₂—, —SC(O)—, —C(O)S—, —OC(O)—, or —C(O)O—, and each G is independently as defined above and described herein.

[1247] In some embodiments, -L-R¹ is —R^{L3}—S—S—R^{L2}, wherein each variable is independently as defined above and described herein. In some embodiments, -L-R¹ is —R^{L3}—C(O)—S—S—R^{L2}, wherein each variable is independently as defined above and described herein.

[1248] In some embodiments, -L-R¹ has the structure of:

[chemical structure]

wherein each variable is independently as defined above and described herein.

[1249] In some embodiments, -L-R¹ has the structure of:

[chemical structure]

wherein each variable is independently as defined above and described herein.

[1250] In some embodiments, -L-R¹ has the structure of:

[chemical structure]

wherein each variable is independently as defined above and described herein.

[1251] In some embodiments, -L-R¹ has the structure of:

[chemical structure]

wherein each variable is independently as defined above and described herein.

[1252] In some embodiments, -L-R¹ has the structure of:

[chemical structure]

wherein each variable is independently as defined above and described herein.

[1253] In some embodiments, -L-R¹ has the structure of:

[chemical structure]

wherein each variable is independently as defined above and described herein.

[1254] In some embodiments, -L-R¹ has the structure of:

[chemical structure]

wherein each variable is independently as defined above and described herein.

[1255] In some embodiments, -L-R¹ has the structure of:

[chemical structure]

wherein each variable is independently as defined above and described herein.

[1256] In some embodiments, -L-R¹ has the structure of:

[chemical structure]

wherein each variable is independently as defined above and described herein.

[1257] In some embodiments, -L-R¹ has the structure of:

[chemical structure]

wherein each variable is independently as defined above and described herein.

[1258] In some embodiments, -L-R¹ has the structure of:

[chemical structure]

wherein each variable is independently as defined above and described herein.

[1259] In some embodiments, -L-R¹ has the structure of:

[chemical structure]

wherein each variable is independently as defined above and described herein.

[1260] In some embodiments, -L-R¹ has the structure of:

[chemical structure]

wherein each variable is independently as defined above and described herein.

[1261] In some embodiments, -L-R¹ has the structure of:

[chemical structure]

wherein each variable is independently as defined above and described herein.

[1262] In some embodiments, -L-R¹ has the structure of:

[chemical structure]

wherein each variable is independently as defined above and described herein.

[1263] In some embodiments, -L-R¹ has the structure of:

[chemical structure]

wherein each variable is independently as defined above and described herein.

[1264] In some embodiments, -L-R¹ has the structure of:

[chemical structure]

wherein each variable is independently as defined above and described herein.

[1265] In some embodiments, -L-R¹ has the structure of:

[chemical structure]

wherein each variable is independently as defined above and described herein.

[1266] In some embodiments, -L-R¹ has the structure of:

[chemical structure]

wherein each variable is independently as defined above and described herein.

[1267] In some embodiments, -L-R¹ has the structure of:

[chemical structure]

wherein each variable is independently as defined above and described herein.

[1268] In some embodiments, -L-R¹ has the structure of:

[chemical structure]

wherein each variable is independently as defined above and described herein.

[1269] In some embodiments, L has the structure of:

[chemical structure]

wherein each variable is independently as defined above and described herein.

[1270] In some embodiments, —X-L-R¹ has the structure of:

[chemical structure]

wherein:

[1271] the phenyl ring is optionally substituted, and

[1272] each of R¹ and X is independently as defined above and described herein.

[1273] In some embodiments, -L-R¹ is

[chemical structure]

[chemical structure]

[chemical structure]

[chemical structure]

[chemical structure]

[1274] In some embodiments, -L-R¹ is:

[chemical structure]

[1275] In some embodiments, -L-R¹ is CH₃—,

[chemical structure]

In some embodiments, -L-R¹ is

[chemical structure]

[1276] In some embodiments, -L-R¹ comprises a terminal optionally substituted —(CH₂)₂— moiety which is connected to X. In some embodiments, -L-R¹ comprises a terminal—(CH₂)₂— moiety which is connected to X. Example such -L-R¹ moieties are depicted below:

[chemical structure]

[1277] In some embodiments, -L-R¹ comprises a terminal optionally substituted —(CH₂)— moiety which is connected to X. In some embodiments, -L-R¹ comprises a terminal—(CH₂)— moiety which is connected to X. Example such -L-R¹ moieties are depicted below:

[chemical structure]

[1278] In some embodiments, -L-R is

[chemical structure]

[1279] In some embodiments, -L-R¹ is CH₃—,

[chemical structure]

### and X is —S—.

[1280] In some embodiments, -L-R¹ is CH₃—,

[chemical structure]

### X is —S—, W is O, Y is —O—, and Z is —O—.

[1281] In some embodiments, R¹ is

[chemical structure]

or —S—(C₁-C₁₀ aliphatic).

[1282] In some embodiments, R¹ is

[chemical structure]

[1283] In some embodiments, X is —O— or —S—, and R¹ is

[chemical structure]

or —S—(C₁-C₁₀ aliphatic).

[1284] In some embodiments, X is —O— or —S—, and R¹ is

[chemical structure]

—S—(C₁-C₁₀ aliphatic) or —S—(C₁-C₅₀ aliphatic).

[1285] In some embodiments, L is a covalent bond and -L-R¹ is R².

[1286] In some embodiments, -L-R¹ is not hydrogen.

[1287] In some embodiments, —X-L-R¹ is R¹ is

[chemical structure]

—S—(C₁-C₁₀ aliphatic) or —S—(C₁-C₅₀ aliphatic).

[1288] In some embodiments, —X-L-R¹ has the structure of

[chemical structure]

wherein the

[chemical structure]

moiety is optionally substituted. In some embodiments, —X-L-R¹ is

[chemical structure]

In some embodiments, —X-L-R¹ is

[chemical structure]

In some embodiments, —X-L-R¹ is

[chemical structure]

In some embodiments, —X-L-R¹ has the structure of

[chemical structure]

wherein X′ is O or S, Y′ is —O—, —S— or —NR′—, and the

[chemical structure]

moiety is optionally substituted. In some embodiments, Y′ is —O—, —S— or —NH—. In some embodiments,

[chemical structure]

In some embodiments,

[chemical structure]

In some embodiments,

[chemical structure]

[1289] In some embodiments, —X-L-R¹ has the structure of

[chemical structure]

wherein X′ is O or S, and the

[chemical structure]

moiety is optionally substituted. In some embodiments,

[chemical structure]

In some embodiments, —X-L-R¹ is

[chemical structure]

wherein the

[chemical structure]

is optionally substituted. In some embodiments, —X-L-R¹ is

[chemical structure]

wherein the

[chemical structure]

is substituted. In some embodiments, —X-L-R¹ is

[chemical structure]

wherein the

[chemical structure]

is unsubstituted.

[1290] In some embodiments, —X-L-R¹ is R¹—C(O)—S-L^{x}-S—, wherein L^{x} is an optionally substituted group selected from

[chemical structure]

In some embodiments, L^{x} is

[chemical structure]

In some embodiments, —X-L-R¹ is (CH₃)₃C—S—S-L^{x}-S—. In some embodiments, —X-L-R¹ is R¹—C(═X′)—Y′—C(R)₂—S-L^{x}-S—. In some embodiments, —X-L-R¹ is R—C(═X′)—Y′—CH₂—S-L^{x}-S—. In some embodiments, —X-L-R¹ is

[chemical structure]

[1291] As will be appreciated by a person skilled in the art, many of the —X-L-R¹ groups described herein are cleavable and can be converted to —X— after administration to a subject. In some embodiments, —X-L-R¹ is cleavable. In some embodiments, —X-L-R¹ is —S-L-R¹, and is converted to —S⁻ after administration to a subject. In some embodiments, the conversion is promoted by an enzyme of a subject. As appreciated by a person skilled in the art, methods of determining whether the —S-L-R¹ group is converted to —S⁻ after administration is widely known and practiced in the art, including those used for studying drug metabolism and pharmacokinetics.

[1292] In some embodiments, the internucleotidic linkage having the structure of formula I is

[chemical structure]

[1293] In some embodiments, the internucleotidic linkage of formula I has the structure of formula I-a:

[chemical structure]

wherein each variable is independently as defined above and described herein.

[1294] In some embodiments, the internucleotidic linkage of formula I has the structure of formula I-b:

[chemical structure]

wherein each variable is independently as defined above and described herein.

[1295] In some embodiments, the internucleotidic linkage of formula I is an phosphorothioate triester linkage having the structure of formula I-c:

[chemical structure]

wherein:
[1296] P* is an asymmetric phosphorus atom and is either Rp or Sp;
[1297] L is a covalent bond or an optionally substituted, linear or branched C₁-C₁₀ alkylene, wherein one or more methylene units of L are optionally and independently replaced by an optionally substituted C₁-C₆ alkylene, C₁-C₆ alkenylene, —C≡C—, —C(R′)₂—, -Cy-, —O—, —S—, —S—S—, —N(R′)—, —C(O)—, —C(S)—, —C(NR′)—, —C(O)N(R′)—, —N(R′)C(O)N(R′)—, —N(R′)C(O)—, —N(R′)C(O)O—, —OC(O)N(R′)—, —S(O)—, —S(O)₂—, —S(O)₂N(R′)—, —N(R′)S(O)₂—, —SC(O)—, —C(O)S—, —OC(O)—, or —C(O)O—;
[1298] R¹ is halogen, R, or an optionally substituted C₁-C₅₀ aliphatic wherein one or more methylene units are optionally and independently replaced by an optionally substituted C₁-C₆ alkylene, C₁-C₆ alkenylene, —C≡C—, —C(R′)₂—, -Cy-, —O—, —S—, —S—S—, —N(R′)—, —C(O)—, —C(S)—, —C(NR′)—, —C(O)N(R′)—, —N(R′)C(O)N(R′)—, —N(R′)C(O)—, —N(R′)C(O)O—, —OC(O)N(R′)—, —S(O)—, —S(O)₂—, —S(O)₂N(R′)—, —N(R′)S(O)₂—, —SC(O)—, —C(O)S—, —OC(O)—, or —C(O)O—;
[1299] each R′ is independently —R, —C(O)R, —CO₂R, or —SO₂R, or:
   [1300] two R′ on the same nitrogen are taken together with their intervening atoms to form an optionally substituted heterocyclic or heteroaryl ring, or
   [1301] two R′ on the same carbon are taken together with their intervening atoms to form an optionally substituted aryl, carbocyclic, heterocyclic, or heteroaryl ring;
[1302] -Cy- is an optionally substituted bivalent ring selected from phenylene, carbocyclylene, arylene, heteroarylene, or heterocyclylene;
[1303] each R is independently hydrogen, or an optionally substituted group selected from C₁-C₆ aliphatic, phenyl, carbocyclyl, aryl, heteroaryl, or heterocyclyl;
[1304] each [symbol] independently represents a connection to a nucleoside; and
[1305] R¹ is not —H when L is a covalent bond.

[1306] In some embodiments, the internucleotidic linkage having the structure of formula I is

[chemical structure]

[chemical structure]

[chemical structure]

[1307] In some embodiments, the internucleotidic linkage having the structure of formula I-c is

[chemical structure]

[chemical structure]

[chemical structure]

[1308] In some embodiments, the present disclosure provides a chirally controlled oligonucleotide comprising one or more phosphate diester linkages, and one or more modified internucleotide linkages having the formula of I-a, I-b, or I-c.

[1309] In some embodiments, a modified internucleotidic linkage has the structure of I. In some embodiments, a modified internucleotidic linkage has the structure of I-a. In some embodiments, a modified internucleotidic linkage has the structure of I-b. In some embodiments, a modified internucleotidic linkage has the structure of I-c.

[1310] In some embodiments, a modified internucleotidic linkage is phosphorothioate. Examples of internucleotidic linkages having the structure of formula I are widely known in the art, including but not limited to those described in US 20110294124, US 20120316224, US 20140194610, US 20150211006, US 20150197540, WO 2015107425, PCT/US2016/043542, and PCT/US2016/043598, each of which is incorporated herein by reference.

[1311] Non-limiting examples of internucleotidic linkages also include those described in the art, including, but not limited to, those described in any of: Gryaznov, S.; Chen, J.-K. J. Am. Chem. Soc. 1994, 116, 3143, Jones et al. J. Org. Chem. 1993, 58, 2983, Koshkin et al. 1998 Tetrahedron 54: 3607-3630, Lauritsen et al. 2002 Chem. Comm. 5: 530-531, Lauritsen et al. 2003 Bioo. Med. Chem. Lett. 13: 253-256, Mesmaeker et al. Angew. Chem., Int. Ed. Engl. 1994, 33, 226, Petersen et al. 2003 TRENDS Biotech. 21: 74-81, Schultz et al. 1996 Nucleic Acids Res. 24: 2966, Ts'o et al. Ann. N. Y. Acad. Sci. 1988, 507, 220, and Vasseur et al. J. Am. Chem. Soc. 1992, 114, 4006.

[1312] In some embodiments, provided oligonucleotides in provided compositions, e.g., oligonucleotides of a first plurality, comprise base modifications, sugar modifications, and/or internucleotidic linkage modifications, wherein one or more modifications is enrichment of deuterium. In some embodiments, e.g., an oligonucleotide is deuterated at one or more of its sugars, nucleobases, internucleotidic linkages, lipid moieties, linker moieties, targeting components, etc. Such oligonucleotides can be used in any composition or method described herein.

[1313] Oligonucleotides of the provided technologies can be of various lengths. In some embodiments, provided oligonucleotides comprise 5, 6, 7, 8, 9, 10, 11, 12, 13, 14, 15, 16, 17, 18, 19, 20, 21, 22, 23, 24, 25, 26, 27, 28, 29, 30, 40, 50 or more bases. In some embodiments, provided oligonucleotides comprise 10, 11, 12, 13, 14, 15, 16, 17, 18, 19, 20, 21, 22, 23, 24, 25, 26, 27, 28, 29, 30, 40, 50 or more bases. In some embodiments, provided oligonucleotides comprise 15, 16, 17, 18, 19, 20, 21, 22, 23, 24, 25, 26, 27, 28, 29, 30, 40, 50 or more bases. In some embodiments, provided oligonucleotides comprise 15 or more bases. In some embodiments, provided oligonucleotides comprise 16 or more bases. In some embodiments, provided oligonucleotides comprise 17 or more bases. In some embodiments, provided oligonucleotides comprise 18 or more bases. In some embodiments, provided oligonucleotides comprise 19 or more bases. In some embodiments, provided oligonucleotides comprise 20 or more bases. In some embodiments, provided oligonucleotides comprise 21 or more bases. In some embodiments, provided oligonucleotides comprise 22 or more bases. In some embodiments, provided oligonucleotides comprise 23 or more bases. In some embodiments, provided oligonucleotides comprise 24 or more bases. In some embodiments, provided oligonucleotides comprise 25 or more bases. In some embodiments, provided oligonucleotides comprise 26 or more bases. In some embodiments, provided oligonucleotides comprise 27 or more bases. In some embodiments, provided oligonucleotides comprise 28 or more bases. In some embodiments, provided oligonucleotides comprise 29 or more bases. In some embodiments, provided oligonucleotides comprise 30 or more bases. In some embodiments, provided oligonucleotides comprise 40 or more bases. In some embodiments, provided oligonucleotides comprise 50 or more bases. In some embodiments, provided oligonucleotides are 15mers. In some embodiments, provided oligonucleotides are 16mers. In some embodiments, provided oligonucleotides are 17mers. In some embodiments, provided oligonucleotides are 18mers. In some embodiments, provided oligonucleotides are 19mers. In some embodiments, provided oligonucleotides are 20mers. In some embodiments, provided oligonucleotides are 21mers. In some embodiments, provided oligonucleotides are 22mers. In some embodiments, provided oligonucleotides are 23mers. In some embodiments, provided oligonucleotides are 24mers. In some embodiments, provided oligonucleotides are 25mers. In some embodiments, provided oligonucleotides are 26mers. In some embodiments, provided oligonucleotides are 27mers. In some embodiments, provided oligonucleotides are 28mers. In some embodiments, provided oligonucleotides are 29mers. In some embodiments, provided oligonucleotides are 30mers.

[1314] In some embodiments, the present disclosure provides a chirally controlled oligonucleotide comprising at least one phosphate diester internucleotidic linkage and at least one phosphorothioate triester linkage having the structure of formula I-c. In some embodiments, the present disclosure provides a chirally controlled oligonucleotide comprising at least one phosphate diester internucleotidic linkage and at least two phosphorothioate triester linkages having the structure of formula I-c. In some embodiments, the present disclosure provides a chirally controlled oligonucleotide comprising at least one phosphate diester internucleotidic linkage and at least three phosphorothioate triester linkages having the structure of formula I-c. In some embodiments, the present disclosure provides a chirally controlled oligonucleotide comprising at least one phosphate diester internucleotidic linkage and at least four phosphorothioate triester linkages having the structure of formula I-c. In some embodiments, the present disclosure provides a chirally controlled oligonucleotide comprising at least one phosphate diester internucleotidic linkage and at least five phosphorothioate triester linkages having the structure of formula I-c.

[1315] In some embodiments, a chirally controlled oligonucleotide is designed such that one or more nucleotides comprise a phosphorus modification prone to “autorelease” under certain conditions. That is, under certain conditions, a particular phosphorus modification is designed such that it self-cleaves from the oligonucleotide to provide, e.g., a phosphate diester such as those found in naturally occurring DNA and RNA. In some embodiments, such a phosphorus modification has a structure of —O-L-R¹, wherein each of L and R¹ is independently as defined above and described herein. In some embodiments, an autorelease group comprises a morpholino group. In some embodiments, an autorelease group is characterized by the ability to deliver an agent to the internucleotidic phosphorus linker, which agent facilitates further modification of the phosphorus atom such as, e.g., desulfurization. In some embodiments, the agent is water and the further modification is hydrolysis to form a phosphate diester as is found in naturally occurring DNA and RNA.

[1316] In some embodiments, a chirally controlled oligonucleotide is designed such that the resulting pharmaceutical properties are improved through one or more particular modifications at phosphorus. It is well documented in the art that certain oligonucleotides are rapidly degraded by nucleases and exhibit poor cellular uptake through the cytoplasmic cell membrane (Poijarvi-Virta et al., Curr. Med. Chem. (2006), 13(28); 3441-65; Wagner et al., Med. Res. Rev. (2000), 20(6):417-51; Peyrottes et al., Mini Rev. Med. Chem. (2004), 4(4):395-408; Gosselin et al., (1996), 43(1):196-208; Bologna et al., (2002), Antisense & Nucleic Acid Drug Development 12:33-41). For instance, Vives et al., (Nucleic Acids Research (1999), 27(20):4071-76) found that tert-butyl SATE pro-oligonucleotides displayed markedly increased cellular penetration compared to the parent oligonucleotide.

[1317] In some embodiments, a modification at a linkage phosphorus is characterized by its ability to be transformed to a phosphate diester, such as those present in naturally occurring DNA and RNA, by one or more esterases, nucleases, and/or cytochrome P450 enzymes, including but not limited to, those listed below:

| Family | Gene |
|---|---|
| CYP1 | CYP1A1, CYP1A2, CYP1B1 |
| CYP2 | CYP2A6, CYP2A7, CYP2A13, CYP2B6, |
| | CYP2C8, CYP2C9, CYP2C18, CYP2C19, |
| | CYP2D6, CYP2E1, CYP2F1, CYP2J2, |
| | CYP2R1, CYP2S1, CYP2U1, CYP2W1 |
| CYP3 | CYP3A4, CYP3A5, CYP3A7, CYP3A43 |
| CYP4 | CYP4A11, CYP4A22, CYP4B1, CYP4F2, |
| | CYP4F3, CYP4F8, CYP4F11, CYP4F12, |
| | CYP4F22, CYP4V2, CYP4X1, CYP4Z1 |
| CYP5 | CYP5A1 |
| CYP7 | CYP7A1, CYP7B1 |
| CYP8 | CYP8A1 (prostacyclin synthase), CYP8B1 |
| | (bile acid biosynthesis) |
| CYP11 | CYP11A1, CYP11B1, CYP11B2 |
| CYP17 | CYP17A1 |
| CYP19 | CYP19A1 |
| CYP20 | CYP20A1 |
| CYP21 | CYP21A2 |
| CYP24 | CYP24A1 |
| CYP26 | CYP26A1, CYP26B1, CYP26C1 |
| CYP27 | CYP27A1 (bile acid biosynthesis), CYP27B1 |
| | (vitamin D3 1-alpha hydroxylase, activates |
| | vitamin D3), CYP27C1 (unknown function) |
| CYP39 | CYP39A1 |
| CYP46 | CYP46A1 |
| CYP51 | CYP51A1 (lanosterol 14-alpha demethylase) |

[1318] In some embodiments, a modification at phosphorus results in a P-modification moiety characterized in that it acts as a pro-drug, e.g., the P-modification moiety facilitates delivery of an oligonucleotide to a desired location prior to removal. For instance, in some embodiments, a P-modification moiety results from PEGylation at the linkage phosphorus. One of skill in the relevant arts will appreciate that various PEG chain lengths are useful and that the selection of chain length will be determined in part by the result that is sought to be achieved by PEGylation. For instance, in some embodiments, PEGylation is effected in order to reduce RES uptake and extend in vivo circulation lifetime of an oligonucleotide.

[1319] In some embodiments, a PEGylation reagent for use in accordance with the present disclosure is of a molecular weight of about 300 g/mol to about 100,000 g/mol. In some embodiments, a PEGylation reagent is of a molecular weight of about 300 g/mol to about 10,000 g/mol. In some embodiments, a PEGylation reagent is of a molecular weight of about 300 g/mol to about 5,000 g/mol. In some embodiments, a PEGylation reagent is of a molecular weight of about 500 g/mol. In some embodiments, a PEGylation reagent of a molecular weight of about 1000 g/mol. In some embodiments, a PEGylation reagent is of a molecular weight of about 3000 g/mol. In some embodiments, a PEGylation reagent is of a molecular weight of about 5000 g/mol.

[1320] In certain embodiments, a PEGylation reagent is PEG500. In certain embodiments, a PEGylation reagent is PEG1000. In certain embodiments, a PEGylation reagent is PEG3000. In certain embodiments, a PEGylation reagent is PEG5000.

[1321] In some embodiments, a P-modification moiety is characterized in that it acts as a PK enhancer, e.g., lipids, PEGylated lipids, etc.

[1322] In some embodiments, a P-modification moiety is characterized in that it acts as an agent which promotes cell entry and/or endosomal escape, such as a membrane-disruptive lipid or peptide.

[1323] In some embodiments, a P-modification moiety is characterized in that it acts as a targeting agent. In some embodiments, a P-modification moiety is or comprises a targeting agent. The phrase “targeting agent,” as used herein, is an entity that is associates with a payload of interest (e.g., with an oligonucleotide or oligonucleotide composition) and also interacts with a target site of interest so that the payload of interest is targeted to the target site of interest when associated with the targeting agent to a materially greater extent than is observed under otherwise comparable conditions when the payload of interest is not associated with the targeting agent. A targeting agent may be, or comprise, any of a variety of chemical moieties, including, for example, small molecule moieties, nucleic acids, polypeptides, carbohydrates, etc. Targeting agents are described further by Adarsh et al., “Organelle Specific Targeted Drug Delivery—A Review,” International Journal of Research in Pharmaceutical and Biomedical Sciences, 2011, p. 895.

[1324] Example such targeting agents include, but are not limited to, proteins (e.g. Transferrin), oligopeptides (e.g., cyclic and acylic RGD-containing oligopedptides), antibodies (monoclonal and polyclonal antibodies, e.g. IgG, IgA, IgM, IgD, IgE antibodies), sugars/carbohydrates (e.g., monosaccharides and/or oligosaccharides (mannose, mannose-6-phosphate, galactose, and the like)), vitamins (e.g., folate), or other small biomolecules. In some embodiments, a targeting moiety is a steroid molecule (e.g., bile acids including cholic acid, deoxycholic acid, dehydrocholic acid; cortisone; digoxigenin; testosterone; cholesterol; cationic steroids such as cortisone having a trimethylaminomethyl hydrazide group attached via a double bond at the 3-position of the cortisone ring, etc.). In some embodiments, a targeting moiety is a lipophilic molecule (e.g., alicyclic hydrocarbons, saturated and unsaturated fatty acids, waxes, terpenes, and polyalicyclic hydrocarbons such as adamantine and buckminsterfullerenes). In some embodiments, a lipophilic molecule is a terpenoid such as vitamin A, retinoic acid, retinal, or dehydroretinal. In some embodiments, a targeting moiety is a peptide.

[1325] In some embodiments, a P-modification moiety is a targeting agent of formula —X-L-R¹ wherein each of X, L, and R¹ are as defined in Formula I above.

[1326] In some embodiments, a P-modification moiety is characterized in that it facilitates cell specific delivery.

[1327] In some embodiments, a P-modification moiety is characterized in that it falls into one or more of the above-described categories. For instance, in some embodiments, a P-modification moiety acts as a PK enhancer and a targeting ligand. In some embodiments, a P-modification moiety acts as a pro-drug and an endosomal escape agent. One of skill in the relevant arts would recognize that numerous other such combinations are possible and are contemplated by the present disclosure.

[1328] In some embodiments, a carbocyclyl, aryl, heteroaryl, or heterocyclyl group, or a bivalent or polyvalent group thereof, is a C₃-C₃₀ carbocyclyl, aryl, heteroaryl, or heterocyclyl group, or a bivalent and/or polyvalent group thereof.

### Nucleobases

[1329] In some embodiments, a nucleobase present in a provided oligonucleotide is a natural nucleobase or a modified nucleobase derived from a natural nucleobase. Examples include, but are not limited to, uracil, thymine, adenine, cytosine, and guanine having their respective amino groups protected by acyl protecting groups, 2-fluorouracil, 2-fluorocytosine, 5-bromouracil, 5-iodouracil, 2,6-diaminopurine, azacytosine, pyrimidine analogs such as pseudoisocytosine and pseudouracil and other modified nucleobases such as 8-substituted purines, xanthine, or hypoxanthine (the latter two being the natural degradation products). Example modified nucleobases are disclosed in Chiu and Rana, RNA, 2003, 9, 1034-1048, Limbach et al. Nucleic Acids Research, 1994, 22, 2183-2196 and Revankar and Rao, Comprehensive Natural Products Chemistry, vol. 7, 313. In some embodiments, a modified nucleobase is substituted uracil, thymine, adenine, cytosine, or guanine. In some embodiments, a modified nucleobase is a functional replacement, e.g., in terms of hydrogen bonding and/or base pairing, of uracil, thymine, adenine, cytosine, or guanine. In some embodiments, a nucleobase is optionally substituted uracil, thymine, adenine, cytosine, 5-methylcytosine, or guanine. In some embodiments, a nucleobase is uracil, thymine, adenine, cytosine, 5-methylcytosine, or guanine.

[1330] In some embodiments, a modified base is optionally substituted adenine, cytosine, guanine, thymine, or uracil. In some embodiments, a modified nucleobase is independently adenine, cytosine, guanine, thymine or uracil, modified by one or more modifications by which:
[1331] (1) a nucleobase is modified by one or more optionally substituted groups independently selected from acyl, halogen, amino, azide, alkyl, alkenyl, alkynyl, aryl, heteroalkyl, heteroalkenyl, heteroalkynyl, heterocyclyl, heteroaryl, carboxyl, hydroxyl, biotin, avidin, streptavidin, substituted silyl, and combinations thereof;
[1332] (2) one or more atoms of a nucleobase are independently replaced with a different atom selected from carbon, nitrogen or sulfur;
[1333] (3) one or more double bonds in a nucleobase are independently hydrogenated; or
[1334] (4) one or more aryl or heteroaryl rings are independently inserted into a nucleobase.

[1335] Structures represented by the following general formulae are also contemplated as modified nucleobases:

[chemical structure]

[chemical structure]

wherein R⁸ is an optionally substituted, linear or branched group selected from aliphatic, aryl, aralkyl, aryloxylalkyl, carbocyclyl, heterocyclyl or heteroaryl group having 1 to 15 carbon atoms, including, by way of example only, a methyl, isopropyl, phenyl, benzyl, or phenoxymethyl group; and each of R⁹ and R¹⁰ is independently an optionally substituted group selected from linear or branched aliphatic, carbocyclyl, aryl, heterocyclyl and heteroaryl.

[1336] Modified nucleobases also include expanded-size nucleobases in which one or more aryl rings, such as phenyl rings, have been added. Nucleic base replacements described in the Glen Research catalog (www.glenresearch.com); Krueger A T et al, Acc. Chem. Res., 2007, 40, 141-150; Kool, ET, Acc. Chem. Res., 2002, 35, 936-943; Benner S. A., et al., Nat. Rev. Genet., 2005, 6, 553-543; Romesberg, F. E., et al., Curr. Opin. Chem. Biol., 2003, 7, 723-733; Hirao, I., Curr. Opin. Chem. Biol., 2006, 10, 622-627, are contemplated as useful for the synthesis of the nucleic acids described herein. Some examples of these expanded-size nucleobases are shown below:

[chemical structure]

[chemical structure]

[1337] Herein, modified nucleobases also encompass structures that are not considered nucleobases but are other moieties such as, but not limited to, corrin- or porphyrin-derived rings. Porphyrin-derived base replacements have been described in Morales-Rojas, H and Kool, E T, Org. Lett., 2002, 4, 4377-4380. Shown below is an example of a porphyrin-derived ring which can be used as a base replacement:

[chemical structure]

[1338] In some embodiments, modified nucleobases are of any one of the following structures, optionally substituted:

[chemical structure]

[1339] In some embodiments, a modified nucleobase is fluorescent. Example such fluorescent modified nucleobases include phenanthrene, pyrene, stillbene, isoxanthine, isozanthopterin, terphenyl, terthiophene, benzoterthiophene, coumarin, lumazine, tethered stillbene, benzo-uracil, and naphtho-uracil, as shown below:

[chemical structure]

[chemical structure]

[1340] In some embodiments, a modified nucleobase is unsubstituted. In some embodiments, a modified nucleobase is substituted. In some embodiments, a modified nucleobase is substituted such that it contains, e.g., heteroatoms, alkyl groups, or linking moieties connected to fluorescent moieties, biotin or avidin moieties, or other protein or peptides. In some embodiments, a modified nucleobase is a “universal base” that is not a nucleobase in the most classical sense, but that functions similarly to a nucleobase. One representative example of such a universal base is 3-nitropyrrole.

[1341] In some embodiments, other nucleosides can also be used in the process disclosed herein and include nucleosides that incorporate modified nucleobases, or nucleobases covalently bound to modified sugars. Some examples of nucleosides or nucleotides that incorporate modified nucleobases include 4-acetylcytidine; 5-(carboxyhydroxylmethyl)uridine; 2′-O-methylcytidine; 5-carboxymethylaminomethyl-2-thiouridine; 5-carboxymethylaminomethyluridine; dihydrouridine; 2′-O-methylpseudouridine; beta,D-galactosylqueosine; 2′-O-methylguanosine; N⁶-isopentenyladenosine; 1-methyladenosine; 1-methylpseudouridine; 1-methylguanosine; 1-methylinosine; 2,2-dimethylguanosine; 2-methyladenosine; 2-methylguanosine; N⁷-methylguanosine; 3-methyl-cytidine; 5-methylcytidine; 5-hydroxymethylcytidine; 5-formylcytosine; 5-carboxylcytosine; N⁶-methyladenosine; 7-methylguanosine; 5-methylaminoethyluridine; 5-methoxyaminomethyl-2-thiouridine; beta,D-mannosylqueosine; 5-methoxycarbonylmethyluridine; 5-methoxyuridine; 2-methylthio-N⁶-isopentenyladenosine; N-((9-beta,D-ribofuranosyl-2-methylthiopurine-6-yl)carbamoyl)threonine; N-((9-beta,D-ribofuranosylpurine-6-yl)-N-methylcarbamoyl)threonine; uridine-5-oxyacetic acid methylester; uridine-5-oxyacetic acid (v); pseudouridine; queosine; 2-thiocytidine; 5-methyl-2-thiouridine; 2-thiouridine; 4-thiouridine; 5-methyluridine; 2′-O-methyl-5-methyluridine; and 2′-O-methyluridine.

[1342] In some embodiments, nucleosides include 6′-modified bicyclic nucleoside analogs that have either (R) or (S)-chirality at the 6′-position and include the analogs described in U.S. Pat. No. 7,399,845. In other embodiments, nucleosides include 5′-modified bicyclic nucleoside analogs that have either (R) or (S)-chirality at the 5′-position and include the analogs described in US Patent Application Publication No. 20070287831.

[1343] In some embodiments, a nucleobase or modified nucleobase comprises one or more biomolecule binding moieties such as e.g., antibodies, antibody fragments, biotin, avidin, streptavidin, receptor ligands, or chelating moieties. In other embodiments, a nucleobase or modified nucleobase is 5-bromouracil, 5-iodouracil, or 2,6-diaminopurine. In some embodiments, a nucleobase or modified nucleobase is modified by substitution with a fluorescent or biomolecule binding moiety. In some embodiments, the substituent on a nucleobase or modified nucleobase is a fluorescent moiety. In some embodiments, the substituent on a nucleobase or modified nucleobase is biotin or avidin.

[1344] Representative U.S. patents that teach the preparation of certain of the above noted modified nucleobases as well as other modified nucleobases include, but are not limited to, the above noted U.S. Pat. No. 3,687,808, as well as U.S. Pat. Nos. 4,845,205; 5,130,30; 5,134,066; 5,175,273; 5,367,066; 5,432,272; 5,457,187; 5,457,191; 5,459,255; 5,484,908; 5,502,177; 5,525,711; 5,552,540; 5,587,469; 5,594,121, 5,596,091; 5,614,617; 5,681,941; 5,750,692; 6,015,886; 6,147,200; 6,166,197; 6,222,025; 6,235,887; 6,380,368; 6,528,640; 6,639,062; 6,617,438; 7,045,610; 7,427,672; and 7,495,088, the modified nucleobases, sugars, and internucleotidic linkages of each of which are incorporated by reference.

[1345] In some embodiments, a base is optionally substituted A, T, C, G or U, wherein one or more —NH₂ are independently and optionally replaced with —C(-L-R′)₃, one or more —NH— are independently and optionally replaced with —C(-L-R¹)₂—, one or more ═N— are independently and optionally replaced with —C(-L-R¹)—, one or more ═CH— are independently and optionally replaced with ═N—, and one or more ═O are independently and optionally replaced with ═S, ═N(-L-R¹), or ═C(-L-R¹)₂, wherein two or more -L-R¹ are optionally taken together with their intervening atoms to form a 3-30 membered bicyclic or polycyclic ring having 0-10 heteroatom ring atoms. In some embodiments, a modified base is optionally substituted A, T, C, G or U, wherein one or more —NH₂ are independently and optionally replaced with —C(-L-R′)₃, one or more —NH— are independently and optionally replaced with —C(-L-R¹)₂—, one or more ═N— are independently and optionally replaced with —C(-L-R¹)—, one or more ═CH— are independently and optionally replaced with ═N—, and one or more ═O are independently and optionally replaced with ═S, ═N(-L-R′), or ═C(-L-R′)₂, wherein two or more -L-R¹ are optionally taken together with their intervening atoms to form a 3-30 membered bicyclic or polycyclic ring having 0-10 heteroatom ring atoms, wherein the modified base is different than the natural A, T, C, G and U. In some embodiments, a base is optionally substituted A, T, C, G or U. In some embodiments, a modified base is substituted A, T, C, G or U, wherein the modified base is different than the natural A, T, C, G and U.

[1346] In some embodiments, a modified nucleotide or nucleotide analog is any modified nucleotide or nucleotide analog described in any of: Albaek et al. 2006 J. Org. Chem. 71: 7731-7740; Braasch et al., Chem. Biol., 2001, 8, 1-7; Chattopadhyaya et al. 2009 J. Org. Chem. 74: 18-134; Elayadi et al, Curr. Opinion Invens. Drugs, 2001, 2, 5561; Frieden et al. 2003 Nucl. Acids Res. 21: 6365-6372; Freier et al. 1997 Nucl. Acids Res. 25: 4429-4443; Gryaznov et al. Am. Chem. Soc. 1994, 116, 3143; Hendrix et al. 1997 Chem. Eur. J. 3: 110; Hyrup et al. 1996 Bioorg. Med. Chem. 4: 5; Jepsen et al. 2004 Oligo. 14: 130-146; Jones et al. J. Org. Chem. 1993, 58, 2983; Koizumi et al. 2003 Nuc. Acids Res. 12: 3267-3273; Koshkin et al. 1998 Tetrahedron 54: 3607-3630; Kumar et al. 1998 Bioo. Med. Chem. Let. 8: 2219-2222; Lauritsen et al. 2002 Chem. Comm. 5: 530-531; Lauritsen et al. 2003 Bioo. Med. Chem. Lett. 13: 253-256; Leumann et al. 2002 Bioorg. Med. Chem. 10: 841-854; Mesmaeker et al. Angew. Chem., Int. Ed. Engl. 1994, 33, 226; Morita et al. 2001 Nucl. Acids Res. Supp. 1: 241-242; Morita et al. 2002 Bioo. Med. Chem. Lett. 12: 73-76; Morita et al. 2003 Bioo. Med. Chem. Lett. 2211-2226; Nielsen et al. 1997 Chem. Soc. Rev. 73; Nielsen et al. 1997 J. Chem. Soc. Perkins Transl. 1: 3423-3433; Obika et al. 1997 Tetrahedron Lett. 38 (50): 8735-8; Obika et al. 1998 Tetrahedron Lett. 39: 5401-5404; Oram et al, Curr. Opinion Mol. Ther., 2001, 3, 239-243; Pallan et al. 2012 Chem. Comm. 48: 8195-8197; Petersen et al. 2003 TRENDS Biotech. 21: 74-81; Rajwanshi et al. 1999 Chem. Commun. 1395-1396; Schultz et al. 1996 Nucleic Acids Res. 24: 2966; Seth et al. 2009 J. Med. Chem. 52: 10-13; Seth et al. 2010 J. Med. Chem. 53: 8309-8318; Seth et al. 2010 J. Org. Chem. 75: 1569-1581; Seth et al. 2012 Bioo. Med. Chem. Lett. 22: 296-299; Seth et al. 2012 Mol. Ther-Nuc. Acids. 1, e47; Seth et al. From Nucleic Acids Symposium Series (2008), 52(1), 553-554; Singh et al. 1998 Chem. Comm. 1247-1248; Singh et al. 1998 J. Org. Chem. 63: 10035-39; Singh et al. 1998 J. Org. Chem. 63: 6078-6079; Singh et al. 1998 Chem. Commun. 4: 455-456; Sorensen 2003 Chem. Comm. 2130-2131; Srivastava et al. 2007 J. Am. Chem. Soc, 129: 8362-8379; Ts'o et al. Ann. N. Y. Acad. Sci. 1988, 507, 220; Van Aerschot et al. 1995 Angew. Chem. Int. Ed. Engl. 34: 1338; Vasseur et al. J. Am. Chem. Soc. 1992, 114, 4006; Wahlestedt et al. 2000 Proc. Natl. Acad. Sci. U.S.A 97: 5633-5638; U.S. Pat. Nos. 3,687,808; 4,845,205; 5,130,302; 5,134,066; 5,175,273; 5,367,066; 5,432,272; 5,457,187; 5,459,255; 5,484,908; 5,502,177; 5,525,711; 5,552,540; 5,587,469; 5,594,121; 5,596,091; 5,614,617; 5,645,985; 5,681,941; 5,750,692; 6,268,490; 6,525,191; 6,670,461; 6,770,748; 6,794,499; 7,034,133; 7,053,207; 7,399,845; and 7,427,672; U.S. Patent Publication Nos. US2004/0171570; US2005/0130923; US2007/0287831; and US2008/0039618; U.S. patent application Ser. Nos. 12/129,154; 60/989,574; 61/026,995; 61/026,998; 61/056,564; 61/086,231; 61/097,787; and 61/099,844; PCT International Applications Nos. PCT/US2008/064591; PCT/US2008/066154; and PCT/US2008/068922. WO 2004/106356; WO 1994/14226; WO 2005/021570; WO 2007/134181; WO 2007/0900071; WO 2008/154401; WO2008/101157; WO2008/150729; WO2009/006478; or WO 2016/079181. Example nucleobases are also described in US 20110294124, US 20120316224, US 20140194610, US 20150211006, US 20150197540, WO 2015107425, PCT/US2016/043542, and PCT/US2016/043598, each of which is incorporated herein by reference.

### Sugars

[1347] In some embodiments, provided oligonucleotides comprise one or more modified sugar moieties.

[1348] The most common naturally occurring nucleotides are comprised of ribose sugars linked to the nucleobases adenosine (A), cytosine (C), guanine (G), and thymine (T) or uracil (U). Also contemplated are modified nucleotides wherein a phosphate group or linkage phosphorus in the nucleotides can be linked to various positions of a sugar or modified sugar. As non-limiting examples, the phosphate group or linkage phosphorus can be linked to the 2′, 3′, 4′ or 5′ hydroxyl moiety of a sugar or modified sugar. Nucleotides that incorporate modified nucleobases as described herein are also contemplated in this context. In some embodiments, nucleotides or modified nucleotides comprising an unprotected —OH moiety are used in accordance with methods of the present disclosure.

[1349] Other modified sugars can also be incorporated within a provided oligonucleotide. In some embodiments, a modified sugar contains one or more substituents at the 2′ position including one of the following: —F; —CF₃, —CN, —N₃, —NO, —NO₂, —OR′, —SR′, or —N(R′)₂, wherein each R′ is independently as defined above and described herein; —O—(C₁-C₁₀ alkyl), —S—(C₁-C₁₀ alkyl), —NH—(C₁-C₁₀ alkyl), or —N(C₁-C₁₀ alkyl)₂; —O—(C₂-C₁₀ alkenyl), —S—(C₂-C₁₀ alkenyl), —NH—(C₂-C₁₀ alkenyl), or —N(C₂-C₁₀ alkenyl)₂; —O—(C₂-C₁₀ alkynyl), —S—(C₂-C₁₀ alkynyl), —NH—(C₂-C₁₀ alkynyl), or —N(C₂-C₁₀ alkynyl)₂; or —O—(C₁-C₁₀ alkylene)-O—(C₁-C₁₀ alkyl), —O—(C₁-C₁₀ alkylene)-NH—(C₁-C₁₀ alkyl) or —O—(C₁-C₁₀ alkylene)-NH(C₁-C₁₀ alkyl)₂, —NH—(C₁-C₁₀ alkylene)-O—(C₁-C₁₀ alkyl), or —N(C₁-C₁₀ alkyl)-(C₁-C₁₀ alkylene)-O—(C₁-C₁₀ alkyl), wherein the alkyl, alkylene, alkenyl and alkynyl may be substituted or unsubstituted. Examples of substituents include, and are not limited to, —O(CH₂)ₙOCH₃, and —O(CH₂)ₙNH₂, wherein n is from 1 to about 10, MOE, DMAOE, DMAEOE. Also contemplated herein are modified sugars described in WO 2001/088198; and Martin et al., Helv. Chim. Acta, 1995, 78, 486-504. In some embodiments, a modified sugar comprises one or more groups selected from a substituted silyl group, an RNA cleaving group, a reporter group, a fluorescent label, an intercalator, a group for improving the pharmacokinetic properties of a nucleic acid, a group for improving the pharmacodynamic properties of a nucleic acid, or other substituents having similar properties. In some embodiments, modifications are made at one or more of the the 2′, 3′, 4′, 5′, or 6′ positions of the sugar or modified sugar, including the 3′ position of the sugar on the 3′-terminal nucleotide or in the 5′ position of the 5′-terminal nucleotide.

[1350] In some embodiments, a 2′-modification is 2′-F.

[1351] In some embodiments, the 2′-OH of a ribose is replaced with a substituent including one of the following: —H, —F; —CF₃, —CN, —N₃, —NO, —NO₂, —OR′, —SR′, or —N(R′)₂, wherein each R′ is independently as defined above and described herein; —O—(C₁-C₁₀ alkyl), —S—(C₁-C₁₀ alkyl), —NH—(C₁-C₁₀ alkyl), or —N(C₁-C₁₀ alkyl)₂; —O—(C₂-C₁₀ alkenyl), —S—(C₂-C₁₀ alkenyl), —NH—(C₂-C₁₀ alkenyl), or —N(C₂-C₁₀ alkenyl)₂; —O—(C₂-C₁₀ alkynyl), —S—(C₂-C₁₀ alkynyl), —NH—(C₂-C₁₀ alkynyl), or —N(C₂-C₁₀ alkynyl)₂; or —O—(C₁-C₁₀ alkylene)-O—(C₁-C₁₀ alkyl), —O—(C₁-C₁₀ alkylene)-NH—(C₁-C₁₀ alkyl) or —O—(C₁-C₁₀ alkylene)-NH(C₁-C₁₀ alkyl)₂, —NH—(C₁-C₁₀ alkylene)-O—(C₁-C₁₀ alkyl), or —N(C₁-C₁₀ alkyl)-(C₁-C₁₀ alkylene)-O—(C₁-C₁₀ alkyl), wherein the alkyl, alkylene, alkenyl and alkynyl may be substituted or unsubstituted. In some embodiments, the 2′-OH is replaced with —H (deoxyribose). In some embodiments, the 2′-OH is replaced with —F. In some embodiments, the 2′-OH is replaced with —OR′. In some embodiments, the 2′-OH is replaced with —OMe. In some embodiments, the 2′-OH is replaced with —OCH₂CH₂OMe.

[1352] Modified sugars also include locked nucleic acids (LNAs). In some embodiments, two substituents on sugar carbon atoms are taken together to form a bivalent moiety. In some embodiments, two substituents are on two different sugar carbon atoms. In some embodiments, a formed bivalent moiety has the structure of -L- as defined herein. In some embodiments, -L- is —O—CH₂—, wherein —CH₂— is optionally substituted. In some embodiments, -L- is —O—CH₂—. In some embodiments, -L- is —O—CH(Et)-. In some embodiments, -L- is between C₂ and C₄ of a sugar moiety. In some embodiments, a locked nucleic acid has the structure indicated below. A locked nucleic acid of the structure below is indicated, wherein Ba represents a nucleobase or modified nucleobase as described herein, and wherein R^{2s} is —OCH₂C4′-.

[chemical structure]

[1353] In some embodiments, a modified sugar is an ENA such as those described in, e.g., Seth et al., J Am Chem Soc. 2010 Oct. 27; 132(42): 14942-14950. In some embodiments, a modified sugar is any of those found in an XNA (xenonucleic acid), for instance, arabinose, anhydrohexitol, threose, 2′ fluoroarabinose, or cyclohexene.

[1354] Modified sugars include sugar mimetics such as cyclobutyl or cyclopentyl moieties in place of the pentofuranosyl sugar. Representative United States patents that teach the preparation of such modified sugar structures include, but are not limited to, U.S. Pat. Nos. 4,981,957; 5,118,800; 5,319,080; and 5,359,044. Some modified sugars that are contemplated include sugars in which the oxygen atom within the ribose ring is replaced by nitrogen, sulfur, selenium, or carbon. In some embodiments, a modified sugar is a modified ribose wherein the oxygen atom within the ribose ring is replaced with nitrogen, and wherein the nitrogen is optionally substituted with an alkyl group (e.g., methyl, ethyl, isopropyl, etc).

[1355] Non-limiting examples of modified sugars include glycerol, which form glycerol nucleic acid (GNA) analogues. One example of a GNA analogue is shown below and is described in Zhang, R et al., J. Am. Chem. Soc., 2008, 130, 5846-5847; Zhang L, et al., J. Am. Chem. Soc., 2005, 127, 4174-4175 and Tsai C H et al., PNAS, 2007, 14598-14603 (X═O⁻):

[chemical structure]

[1356] Another example of a GNA derived analogue, flexible nucleic acid (FNA) based on the mixed acetal aminal of formyl glycerol, is described in Joyce G F et al., PNAS, 1987, 84, 4398-4402 and Heuberger B D and Switzer C, J. Am. Chem. Soc., 2008, 130, 412-413, and is shown below:

[chemical structure]

[1357] Additional non-limiting examples of modified sugars include hexopyranosyl (6′ to 4′), pentopyranosyl (4′ to 2′), pentopyranosyl (4′ to 3′), or tetrofuranosyl (3′ to 2′) sugars. In some embodiments, a hexopyranosyl (6′ to 4′) sugar is of any one in the following formulae:

[chemical structure]

wherein X^{s} corresponds to the P-modification group “—XLR¹” described herein and Ba is as defined herein.

[1358] In some embodiments, a pentopyranosyl (4′ to 2′) sugar is of any one in the following formulae:

[chemical structure]

wherein X^{s} corresponds to the P-modification group “—XLR¹” described herein and Ba is as defined herein.

[1359] In some embodiments, a pentopyranosyl (4′ to 3′) sugar is of any one in the following formulae:

[chemical structure]

wherein X^{s} corresponds to the P-modification group “—XLR¹” described herein and Ba is as defined herein.

[1360] In some embodiments, a tetrofuranosyl (3′ to 2′) sugar is of either in the following formulae:

[chemical structure]

wherein X^{s} corresponds to the P-modification group “—XLR¹” described herein and Ba is as defined herein.

[1361] In some embodiments, a modified sugar is of any one in the following formulae:

[chemical structure]

[chemical structure]

wherein X^{s} corresponds to the P-modification group “—XLR¹” described herein and Ba is as defined herein.

[1362] In some embodiments, one or more hydroxyl group in a sugar moiety is optionally and independently replaced with halogen, R′ —N(R′)₂, —OR′, or —SR′, wherein each R′ is independently as defined above and described herein.

[1363] In some embodiments, a sugar mimetic is as illustrated below, wherein X′ corresponds to the P-modification group “—XLR¹” described herein, Ba is as defined herein, and X¹ is selected from —S—, —Se—, —CH₂—, —NMe-, —NEt- or —NiPr—.

[chemical structure]

[chemical structure]

[chemical structure]

[1364] In some embodiments, at least 1%, 2%, 3%, 4%, 5%, 6%, 7%, 8%, 9%, 10%, 11%, 12%, 13%, 14%, 15%, 16%, 17%, 18%, 19%, 20%, 21%, 22%, 23%, 24%, 25%, 26%, 27%, 28%, 29%, 30%, 31%, 32%, 33%, 34%, 35%, 36%, 37%, 38%, 39%, 40%, 41%, 42%, 43%, 44%, 45%, 46%, 47%, 48%, 49%, 50% or more (e.g., 55%, 60%, 65%, 70%, 75%, 80%, 85%, 90%, 95% or more), inclusive, of the sugars in a chirally controlled oligonucleotide composition are modified. In some embodiments, only purine residues are modified (e.g., about 1%, 2%, 3%, 4%, 5%, 6%, 7%, 8%, 9%, 10%, 11%, 12%, 13%, 14%, 15%, 16%, 17%, 18%, 19%, 20%, 21%, 22%, 23%, 24%, 25%, 26%, 27%, 28%, 29%, 30%, 31%, 32%, 33%, 34%, 35%, 36%, 37%, 38%, 39%, 40%, 41%, 42%, 43%, 44%, 45%, 46%, 47%, 48%, 49%, 50% or more [e.g., 55%, 60%, 65%, 70%, 75%, 80%, 85%, 90%, 95% or more] of the purine residues are modified). In some embodiments, only pyrimidine residues are modified (e.g., about 1%, 2%, 3%, 4%, 5%, 6%, 7%, 8%, 9%, 10%, 11%, 12%, 13%, 14%, 15%, 16%, 17%, 18%, 19%, 20%, 21%, 22%, 23%, 24%, 25%, 26%, 27%, 28%, 29%, 30%, 31%, 32%, 33%, 34%, 35%, 36%, 37%, 38%, 39%, 40%, 41%, 42%, 43%, 44%, 45%, 46%, 47%, 48%, 49%, 50% or more [e.g., 55%, 60%, 65%, 70%, 75%, 80%, 85%, 90%, 95% or more] of the pyridimine residues are modified). In some embodiments, both purine and pyrimidine residues are modified.

[1365] Modified sugars and sugar mimetics can be prepared by methods known in the art, including, but not limited to: A. Eschenmoser, Science (1999), 284:2118; M. Bohringer et al, Helv. Chim. Acta (1992), 75:1416-1477; M. Egli et al, J. Am. Chem. Soc. (2006), 128(33):10847-56; A. Eschenmoser in Chemical Synthesis: Gnosis to Prognosis, C. Chatgilialoglu and V. Sniekus, Ed., (Kluwer Academic, Netherlands, 1996), p.293; K.-U. Schoning et al, Science (2000), 290:1347-1351; A. Eschenmoser et al, Helv. Chim. Acta (1992), 75:218; J. Hunziker et al, Helv. Chim. Acta (1993), 76:259; G. Otting et al, Helv. Chim. Acta (1993), 76:2701; K. Groebke et al, Helv. Chim. Acta (1998), 81:375; and A. Eschenmoser, Science (1999), 284:2118. Modifications to the 2′ modifications can be found in Verma, S. et al. Annu. Rev. Biochem. 1998, 67, 99-134 and all references therein. Specific modifications to the ribose can be found in the following references: 2′-fluoro (Kawasaki et. al., J. Med. Chem., 1993, 36, 831-841), 2′-MOE (Martin, P. Helv. Chim. Acta 1996, 79, 1930-1938), “LNA” (Wengel, J. Acc. Chem. Res. 1999, 32, 301-310). In some embodiments, a modified sugar is any of those described in PCT Publication No. WO2012/030683, incorporated herein by reference, and/or depicted herein. In some embodiments, a modified sugar is any modified sugar described in any of: Gryaznov, S; Chen, J.-K. J. Am. Chem. Soc. 1994, 116, 3143; Hendrix et al. 1997 Chem. Eur. J. 3: 110; Hyrup et al. 1996 Bioorg. Med. Chem. 4: 5; Jepsen et al. 2004 Oligo. 14: 130-146; Jones et al. J. Org. Chem. 1993, 58, 2983; Koizumi et al. 2003 Nuc. Acids Res. 12: 3267-3273; Koshkin et al. 1998 Tetrahedron 54: 3607-3630; Kumar et al. 1998 Bioo. Med. Chem. Let. 8: 2219-2222; Lauritsen et al. 2002 Chem. Comm. 5: 530-531; Lauritsen et al. 2003 Bioo. Med. Chem. Lett. 13: 253-256; Mesmaeker et al. Angew. Chem., Int. Ed. Engl. 1994, 33, 226; Morita et al. 2001 Nucl. Acids Res. Supp. 1: 241-242; Morita et al. 2002 Bioo. Med. Chem. Lett. 12: 73-76; Morita et al. 2003 Bioo. Med. Chem. Lett. 2211-2226; Nielsen et al. 1997 Chem. Soc. Rev. 73; Nielsen et al. 1997 J. Chem. Soc. Perkins Transl. 1: 3423-3433; Obika et al. 1997 Tetrahedron Lett. 38 (50): 8735-8; Obika et al. 1998 Tetrahedron Lett. 39: 5401-5404; Pallan et al. 2012 Chem. Comm. 48: 8195-8197; Petersen et al. 2003 TRENDS Biotech. 21: 74-81; Rajwanshi et al. 1999 Chem. Commun. 1395-1396; Schultz et al. 1996 Nucleic Acids Res. 24: 2966; Seth et al. 2009 J. Med. Chem. 52: 10-13; Seth et al. 2010 J. Med. Chem. 53: 8309-8318; Seth et al. 2010 J. Org. Chem. 75: 1569-1581; Seth et al. 2012 Bioo. Med. Chem. Lett. 22: 296-299; Seth et al. 2012 Mol. Ther-Nuc. Acids. 1, e47; Seth, Punit P; Siwkowski, Andrew; Allerson, Charles R; Vasquez, Guillermo; Lee, Sam; Prakash, Thazha P; Kinberger, Garth; Migawa, Michael T; Gaus, Hans; Bhat, Balkrishen; et al. From Nucleic Acids Symposium Series (2008), 52(1), 553-554; Singh et al. 1998 Chem. Comm. 1247-1248; Singh et al. 1998 J. Org. Chem. 63: 10035-39; Singh et al. 1998 J. Org. Chem. 63: 6078-6079; Sorensen 2003 Chem. Comm. 2130-2131; Ts'o et al. Ann. N. Y. Acad. Sci. 1988, 507, 220; Van Aerschot et al. 1995 Angew. Chem. Int. Ed. Engl. 34: 1338; Vasseur et al. J. Am. Chem. Soc. 1992, 114, 4006; WO 20070900071; WO 20070900071; or WO 2016/079181.

[1366] In some embodiments, a modified sugar moiety is an optionally substituted pentose or hexose moiety. In some embodiments, a modified sugar moiety is an optionally substituted pentose moiety. In some embodiments, a modified sugar moiety is an optionally substituted hexose moiety. In some embodiments, a modified sugar moiety is an optionally substituted ribose or hexitol moiety. In some embodiments, a modified sugar moiety is an optionally substituted ribose moiety. In some embodiments, a modified sugar moiety is an optionally substituted hexitol moiety.

[1367] In some embodiments, an example modified internucleotidic linkage and/or sugar is selected from those of:

[chemical structure]

[chemical structure]

[chemical structure]

[chemical structure]

In some embodiments, R¹ is R as defined and described. In some embodiments, R² is R. In some embodiments, R^{c} is R. In some embodiments, Re is H, CH₃, Bn, COCF₃, benzoyl, benzyl, pyren-1-ylcarbonyl, pyren-1-ylmethyl, 2-aminoethyl. In some embodiments, an example modified internucleotidic linkage and/or sugar is selected from those described in Ts'o et al. Ann. N. Y. Acad. Sci. 1988, 507, 220; Gryaznov, S.; Chen, J.-K. J. Am. Chem. Soc. 1994, 116, 3143; Mesmaeker et al. Angew. Chem., Int. Ed. Engl. 9, 33, 226; Jones et al. J. Org. Chem. 9, 58, 2983; Vasseur et al. J. Am. Chem. Soc. 1992, 114, 4006; Van Aerschot et al. 1995 Angew. Chem. Int. Ed. Engl. 34: 1338; Hendrix et al. 1997 Chem. Eur. J. 3: 110; Koshkin et al. 1998 Tetrahedron 54: 3607-3630; Hyrup et al. 1996 Bioorg. Med. Chem. 4: 5; Nielsen et al. 1997 Chem. Soc. Rev. 73; Schultz et al. 1996 Nucleic Acids Res. 24: 2966; Obika et al. 1997 Tetrahedron Lett. 38 (50): 8735-8; Obika et al. 1998 Tetrahedron Lett. 39: 5401-5404; Singh et al. 1998 Chem. Comm. 1247-1248; Kumar et al. 1998 Bioo. Med. Chem. Let. 8: 2219-2222; Nielsen et al. 1997 J. Chem. Soc. Perkins Transl. 1: 3423-3433; Singh et al. 1998 J. Org. Chem. 63: 6078-6079; Seth et al. 2010 J. Org. Chem. 75: 1569-1581; Singh et al. 1998 J. Org. Chem. 63: 10035-39; Sorensen 2003 Chem. Comm. 2130-2131; Petersen et al. 2003 TRENDS Biotech. 21: 74-81; Rajwanshi et al. 1999 Chem. Commun. 1395-1396; Jepsen et al. 2004 Oligo. 14: 130-146; Morita et al. 2001 Nucl. Acids Res. Supp. 1: 241-242; Morita et al. 2002 Bioo. Med. Chem. Lett. 12: 73-76; Morita et al. 2003 Bioo. Med. Chem. Lett. 2211-2226; Koizumi et al. 2003 Nuc. Acids Res. 12: 3267-3273; Lauritsen et al. 2002 Chem. Comm. 5: 530-531; Lauritsen et al. 2003 Bioo. Med. Chem. Lett. 13: 253-256; WO 20070900071; Seth et al., Nucleic Acids Symposium Series (2008), 52(1), 553-554; Seth et al. 2009 J. Med. Chem. 52: 10-13; Seth et al. 2012 Mol. Ther-Nuc. Acids. 1, e47; Pallan et al. 2012 Chem. Comm. 48: 8195-8197; Seth et al. 2010 J. Med. Chem. 53: 8309-8318; Seth et al. 2012 Bioo. Med. Chem. Lett. 22: 296-299; WO 2016/079181; U.S. Pat. Nos. 6,326,199; 6,066,500; and 6,440,739, the base and sugar modifications of each of which is herein incorporated by reference.

[1368] In some embodiments, the present disclosure provides oligonucleotides and oligonucleotide compositions that are chirally controlled. For instance, in some embodiments, a provided composition contains predetermined levels of one or more individual oligonucleotide types, wherein an oligonucleotide type is defined by: 1) base sequence; 2) pattern of backbone linkages; 3) pattern of backbone chiral centers; and 4) pattern of backbone P-modifications. In some embodiments, a particular oligonucleotide type may be defined by 1A) base identity; 1B) pattern of base modification; 1C) pattern of sugar modification; 2) pattern of backbone linkages; 3) pattern of backbone chiral centers; and 4) pattern of backbone P-modifications. In some embodiments, oligonucleotides of the same oligonucleotide type are identical.

[1369] In some embodiments, a provided oligonucleotide is a unimer. In some embodiments, a provided oligonucleotide is a P-modification unimer. In some embodiments, a provided oligonucleotide is a stereounimer. In some embodiments, a provided oligonucleotide is a stereounimer of configuration Rp. In some embodiments, a provided oligonucleotide is a stereounimer of configuration Sp.

[1370] In some embodiments, a provided oligonucleotide is an altmer. In some embodiments, a provided oligonucleotide is a P-modification altmer. In some embodiments, a provided oligonucleotide is a stereoaltmer.

[1371] In some embodiments, a provided oligonucleotide is a blockmer. In some embodiments, a provided oligonucleotide is a P-modification blockmer. In some embodiments, a provided oligonucleotide is a stereoblockmer.

[1372] In some embodiments, a provided oligonucleotide is a gapmer.

[1373] In some embodiments, a provided oligonucleotide is a skipmer.

[1374] In some embodiments, a provided oligonucleotide is a hemimer. In some embodiments, a hemimer is an oligonucleotide wherein the 5′-end or the 3′-end has a sequence that possesses a structure feature that the rest of the oligonucleotide does not have. In some embodiments, the 5′-end or the 3′-end has or comprises 2 to 20 nucleotides. In some embodiments, a structural feature is a base modification. In some embodiments, a structural feature is a sugar modification. In some embodiments, a structural feature is a P-modification. In some embodiments, a structural feature is stereochemistry of the chiral internucleotidic linkage. In some embodiments, a structural feature is or comprises a base modification, a sugar modification, a P-modification, or stereochemistry of the chiral internucleotidic linkage, or combinations thereof. In some embodiments, a hemimer is an oligonucleotide in which each sugar moiety of the 5′-end sequence shares a common modification. In some embodiments, a hemimer is an oligonucleotide in which each sugar moiety of the 3′-end sequence shares a common modification. In some embodiments, a common sugar modification of the 5′ or 3′ end sequence is not shared by any other sugar moieties in the oligonucleotide. In some embodiments, an example hemimer is an oligonucleotide comprising a sequence of substituted or unsubstituted 2′-O-alkyl sugar modified nucleosides, bicyclic sugar modified nucleosides, p-D-ribonucleosides or p-D-deoxyribonucleosides (for example 2′-MOE modified nucleosides, and LNA™ or ENA™ bicyclic sugar modified nucleosides) at one terminus and a sequence of nucleosides with a different sugar moiety (such as a substituted or unsubstituted 2′-O-alkyl sugar modified nucleosides, bicyclic sugar modified nucleosides or natural ones) at the other terminus. In some embodiments, a provided oligonucleotide is a combination of one or more of unimer, altmer, blockmer, gapmer, hemimer and skipmer. In some embodiments, a provided oligonucleotide is a combination of one or more of unimer, altmer, blockmer, gapmer, and skipmer. For instance, in some embodiments, a provided oligonucleotide is both an altmer and a gapmer. In some embodiments, a provided nucleotide is both a gapmer and a skipmer. One of skill in the chemical and synthetic arts will recognize that numerous other combinations of patterns are available and are limited only by the commercial availability and/or synthetic accessibility of constituent parts required to synthesize a provided oligonucleotide in accordance with methods of the present disclosure. In some embodiments, a hemimer structure provides advantageous benefits, as exemplified by FIG. 29. In some embodiments, provided oligonucleotides are 5′-hemmimers that comprises modified sugar moieties in a 5′-end sequence. In some embodiments, provided oligonucleotides are 5′-hemmimers that comprises modified 2′-sugar moieties in a 5′-end sequence.

[1375] In some embodiments, a provided oligonucleotide comprises one or more optionally substituted nucleotides. In some embodiments, a provided oligonucleotide comprises one or more modified nucleotides. In some embodiments, a provided oligonucleotide comprises one or more optionally substituted nucleosides. In some embodiments, a provided oligonucleotide comprises one or more modified nucleosides. In some embodiments, a provided oligonucleotide comprises one or more optionally substituted LNAs.

[1376] In some embodiments, a provided oligonucleotide comprises one or more optionally substituted nucleobases. In some embodiments, a provided oligonucleotide comprises one or more optionally substituted natural nucleobases. In some embodiments, a provided oligonucleotide comprises one or more optionally substituted modified nucleobases. In some embodiments, a provided oligonucleotide comprises one or more 5-methylcytidine; 5-hydroxymethylcytidine, 5-formylcytosine, or 5-carboxylcytosine. In some embodiments, a provided oligonucleotide comprises one or more 5-methylcytidine.

[1377] In some embodiments, a provided oligonucleotide comprises one or more optionally substituted sugars. In some embodiments, a provided oligonucleotide comprises one or more optionally substituted sugars found in naturally occurring DNA and RNA. In some embodiments, a provided oligonucleotide comprises one or more optionally substituted ribose or deoxyribose. In some embodiments, a provided oligonucleotide comprises one or more optionally substituted ribose or deoxyribose, wherein one or more hydroxyl groups of the ribose or deoxyribose moiety is optionally and independently replaced by halogen, R′, —N(R′)₂, —OR′, or —SR′, wherein each R′ is independently as defined above and described herein. In some embodiments, a provided oligonucleotide comprises one or more optionally substituted deoxyribose, wherein the 2′ position of the deoxyribose is optionally and independently substituted with halogen, R′, —N(R′)₂, —OR′, or —SR′, wherein each R′ is independently as defined above and described herein. In some embodiments, a provided oligonucleotide comprises one or more optionally substituted deoxyribose, wherein the 2′ position of the deoxyribose is optionally and independently substituted with halogen. In some embodiments, a provided oligonucleotide comprises one or more optionally substituted deoxyribose, wherein the 2′ position of the deoxyribose is optionally and independently substituted with one or more —F. halogen. In some embodiments, a provided oligonucleotide comprises one or more optionally substituted deoxyribose, wherein the 2′ position of the deoxyribose is optionally and independently substituted with —OR′, wherein each R′ is independently as defined above and described herein. In some embodiments, a provided oligonucleotide comprises one or more optionally substituted deoxyribose, wherein the 2′ position of the deoxyribose is optionally and independently substituted with —OR′, wherein each R′ is independently an optionally substituted C₁-C₆ aliphatic. In some embodiments, a provided oligonucleotide comprises one or more optionally substituted deoxyribose, wherein the 2′ position of the deoxyribose is optionally and independently substituted with —OR′, wherein each R′ is independently an optionally substituted C₁-C₆ alkyl. In some embodiments, a provided oligonucleotide comprises one or more optionally substituted deoxyribose, wherein the 2′ position of the deoxyribose is optionally and independently substituted with —OMe. In some embodiments, a provided oligonucleotide comprises one or more optionally substituted deoxyribose, wherein the 2′ position of the deoxyribose is optionally and independently substituted with —O-methoxyethyl.

[1378] In some embodiments, a provided oligonucleotide is single-stranded oligonucleotide.

[1379] In some embodiments, a provided oligonucleotide is a hybridized oligonucleotide strand. In certain embodiments, a provided oligonucleotide is a partially hydridized oligonucleotide strand. In certain embodiments, a provided oligonucleotide is a completely hydridized oligonucleotide strand. In certain embodiments, a provided oligonucleotide is a double-stranded oligonucleotide. In certain embodiments, a provided oligonucleotide is a triple-stranded oligonucleotide (e.g., a triplex).

[1380] In some embodiments, a provided oligonucleotide is chimeric. For example, in some embodiments, a provided oligonucleotide is DNA-RNA chimera, DNA-LNA chimera, etc.

[1381] In some embodiments, any one of the structures comprising an oligonucleotide depicted in WO2012/030683 can be modified in accordance with methods of the present disclosure to provide chirally controlled variants thereof. For example, in some embodiments the chirally controlled variants comprise a stereochemical modification at any one or more of the linkage phosphorus and/or a P-modification at any one or more of the linkage phosphorus. For example, in some embodiments, a particular nucleotide unit of an oligonucleotide of WO2012/030683 is preselected to be stereochemically modified at the linkage phosphorus of that nucleotide unit and/or P-modified at the linkage phosphorus of that nucleotide unit. e.g., The related disclosure of WO2012/030683 is herein incorporated by reference in its entirety.

[1382] In some embodiments, a provided oligonucleotide is a therapeutic agent.

[1383] In some embodiments, a provided oligonucleotide is an antisense oligonucleotide.

[1384] In some embodiments, a provided oligonucleotide is an antigene oligonucleotide.

[1385] In some embodiments, a provided oligonucleotide is a decoy oligonucleotide.

[1386] In some embodiments, a provided oligonucleotide is part of a DNA vaccine.

[1387] In some embodiments, a provided oligonucleotide is an immunomodulatory oligonucleotide, e.g., immunostimulatory oligonucleotide and immunoinhibitory oligonucleotide.

[1388] In some embodiments, a provided oligonucleotide is an adjuvant.

[1389] In some embodiments, a provided oligonucleotide is an aptamer.

[1390] In some embodiments, a provided oligonucleotide is a ribozyme.

[1391] In some embodiments, a provided oligonucleotide is a deoxyribozyme (DNAzymes or DNA enzymes).

[1392] In some embodiments, a provided oligonucleotide is an siRNA.

[1393] In some embodiments, a provided oligonucleotide is a microRNA, or miRNA.

[1394] In some embodiments, a provided oligonucleotide is a ncRNA (non-coding RNAs), including a long non-coding RNA (lncRNA) and a small non-coding RNA, such as piwi-interacting RNA (piRNA).

[1395] In some embodiments, a provided oligonucleotide is complementary to a structural RNA, e.g., tRNA.

[1396] In some embodiments, a provided oligonucleotide is a nucleic acid analog, e.g., GNA, LNA, PNA, TNA and Morpholino.

[1397] In some embodiments, a provided oligonucleotide is a P-modified prodrug.

[1398] In some embodiments, a provided oligonucleotide is a primer. In some embodiments, a primers is for use in polymerase-based chain reactions (i.e., PCR) to amplify nucleic acids. In some embodiments, a primer is for use in any known variations of PCR, such as reverse transcription PCR (RT-PCR) and real-time PCR.

[1399] In some embodiments, a provided oligonucleotide is characterized as having the ability to modulate RNase H activation. For example, in some embodiments, RNase H activation is modulated by the presence of stereocontrolled phosphorothioate nucleic acid analogs, with natural DNA/RNA being more or equally susceptible than the Rp stereoisomer, which in turn is more susceptible than the corresponding Sp stereoisomer.

[1400] In some embodiments, a provided oligonucleotide is characterized as having the ability to indirectly or directly increase or decrease activity of a protein or inhibition or promotion of the expression of a protein. In some embodiments, a provided oligonucleotide is characterized in that it is useful in the control of cell proliferation, viral replication, and/or any other cell signaling process.

[1401] In some embodiments, a provided oligonucleotide is from about 2 to about 200 nucleotide units in length. In some embodiments, a provided oligonucleotide is from about 2 to about 180 nucleotide units in length. In some embodiments, a provided oligonucleotide is from about 2 to about 160 nucleotide units in length. In some embodiments, a provided oligonucleotide is from about 2 to about 140 nucleotide units in length. In some embodiments, a provided oligonucleotide is from about 2 to about 120 nucleotide units in length. In some embodiments, a provided oligonucleotide is from about 2 to about 100 nucleotide units in length. In some embodiments, a provided oligonucleotide is from about 2 to about 90 nucleotide units in length. In some embodiments, a provided oligonucleotide is from about 2 to about 80 nucleotide units in length. In some embodiments, a provided oligonucleotide is from about 2 to about 70 nucleotide units in length. In some embodiments, a provided oligonucleotide is from about 2 to about 60 nucleotide units in length. In some embodiments, a provided oligonucleotide is from about 2 to about 50 nucleotide units in length. In some embodiments, a provided oligonucleotide is from about 2 to about 40 nucleotide units in length. In some embodiments, a provided oligonucleotide is from about 2 to about 30 nucleotide units in length. In some embodiments, a provided oligonucleotide is from about 2 to about 29 nucleotide units in length. In some embodiments, a provided oligonucleotide is from about 2 to about 28 nucleotide units in length. In some embodiments, a provided oligonucleotide is from about 2 to about 27 nucleotide units in length. In some embodiments, a provided oligonucleotide is from about 2 to about 26 nucleotide units in length. In some embodiments, a provided oligonucleotide is from about 2 to about 25 nucleotide units in length. In some embodiments, a provided oligonucleotide is from about 2 to about 24 nucleotide units in length. In some embodiments, a provided oligonucleotide is from about 2 to about 23 nucleotide units in length. In some embodiments, a provided oligonucleotide is from about 2 to about 22 nucleotide units in length. In some embodiments, a provided oligonucleotide is from about 2 to about 21 nucleotide units in length. In some embodiments, a provided oligonucleotide is from about 2 to about 20 nucleotide units in length.

[1402] In some embodiments, a provided oligonucleotide is from about 4 to about 200 nucleotide units in length. In some embodiments, a provided oligonucleotide is from about 4 to about 180 nucleotide units in length. In some embodiments, a provided oligonucleotide is from about 4 to about 160 nucleotide units in length. In some embodiments, a provided oligonucleotide is from about 4 to about 140 nucleotide units in length. In some embodiments, a provided oligonucleotide is from about 4 to about 120 nucleotide units in length. In some embodiments, a provided oligonucleotide is from about 4 to about 100 nucleotide units in length. In some embodiments, a provided oligonucleotide is from about 4 to about 90 nucleotide units in length. In some embodiments, a provided oligonucleotide is from about 4 to about 80 nucleotide units in length. In some embodiments, a provided oligonucleotide is from about 4 to about 70 nucleotide units in length. In some embodiments, a provided oligonucleotide is from about 4 to about 60 nucleotide units in length. In some embodiments, a provided oligonucleotide is from about 4 to about 50 nucleotide units in length. In some embodiments, a provided oligonucleotide is from about 4 to about 40 nucleotide units in length. In some embodiments, a provided oligonucleotide is from about 4 to about 30 nucleotide units in length. In some embodiments, a provided oligonucleotide is from about 4 to about 29 nucleotide units in length. In some embodiments, a provided oligonucleotide is from about 4 to about 28 nucleotide units in length. In some embodiments, a provided oligonucleotide is from about 4 to about 27 nucleotide units in length. In some embodiments, a provided oligonucleotide is from about 4 to about 26 nucleotide units in length. In some embodiments, a provided oligonucleotide is from about 4 to about 25 nucleotide units in length. In some embodiments, a provided oligonucleotide is from about 4 to about 24 nucleotide units in length. In some embodiments, a provided oligonucleotide is from about 4 to about 23 nucleotide units in length. In some embodiments, a provided oligonucleotide is from about 4 to about 22 nucleotide units in length. In some embodiments, a provided oligonucleotide is from about 4 to about 21 nucleotide units in length. In some embodiments, a provided oligonucleotide is from about 4 to about 20 nucleotide units in length.

[1403] In some embodiments, a provided oligonucleotide is from about 5 to about 10 nucleotide units in length. In some embodiments, a provided oligonucleotide is from about 10 to about 30 nucleotide units in length. In some embodiments, a provided oligonucleotide is from about 15 to about 25 nucleotide units in length. In some embodiments, a provided oligonucleotide is from about 5, 6, 7, 8, 9, 10, 11, 12, 13, 14, 15, 16, 17, 18, 19, 20, 21, 22, 23, 24, or 25 nucleotide units in length.

[1404] In some embodiments, an oligonucleotide is at least 2 nucleotide units in length. In some embodiments, an oligonucleotide is at least 3 nucleotide units in length. In some embodiments, an oligonucleotide is at least 4 nucleotide units in length. In some embodiments, an oligonucleotide is at least 5 nucleotide units in length. In some embodiments, an oligonucleotide is at least 6 nucleotide units in length. In some embodiments, an oligonucleotide is at least 7 nucleotide units in length. In some embodiments, an oligonucleotide is at least 8 nucleotide units in length. In some embodiments, an oligonucleotide is at least 9 nucleotide units in length. In some embodiments, an oligonucleotide is at least 10 nucleotide units in length. In some embodiments, an oligonucleotide is at least 11 nucleotide units in length. In some embodiments, an oligonucleotide is at least 12 nucleotide units in length. In some embodiments, an oligonucleotide is at least 13 nucleotide units in length. In some embodiments, an oligonucleotide is at least 14 nucleotide units in length. In some embodiments, an oligonucleotide is at least 15 nucleotide units in length. In some embodiments, an oligonucleotide is at least 16 nucleotide units in length. In some embodiments, an oligonucleotide is at least 17 nucleotide units in length. In some embodiments, an oligonucleotide is at least 18 nucleotide units in length. In some embodiments, an oligonucleotide is at least 19 nucleotide units in length. In some embodiments, an oligonucleotide is at least 20 nucleotide units in length. In some embodiments, an oligonucleotide is at least 21 nucleotide units in length. In some embodiments, an oligonucleotide is at least 22 nucleotide units in length. In some embodiments, an oligonucleotide is at least 23 nucleotide units in length. In some embodiments, an oligonucleotide is at least 24 nucleotide units in length. In some embodiments, an oligonucleotide is at least 25 nucleotide units in length. In some other embodiments, an oligonucleotide is at least 30 nucleotide units in length. In some other embodiments, an oligonucleotide is a duplex of complementary strands of at least 18 nucleotide units in length. In some other embodiments, an oligonucleotide is a duplex of complementary strands of at least 21 nucleotide units in length.

[1405] In some embodiments, the 5′-end and/or the 3′-end of a provided oligonucleotide is modified. In some embodiments, the 5′-end and/or the 3′-end of a provided oligonucleotide is modified with a terminal cap moiety. Example such modifications, including terminal cap moieties are extensively described herein and in the art, for example but not limited to those described in US Patent Application Publication US 2009/0023675A1.

[1406] In some embodiments, oligonucleotides of an oligonucleotide type characterized by 1) a common base sequence and length, 2) a common pattern of backbone linkages, and 3) a common pattern of backbone chiral centers, have the same chemical structure. For example, they have the same base sequence, the same pattern of nucleoside modifications, the same pattern of backbone linkages (i.e., pattern of internucleotidic linkage types, for example, phosphate, phosphorothioate, etc), the same pattern of backbone chiral centers (i.e. pattern of linkage phosphorus stereochemistry (Rp/Sp)), and the same pattern of backbone phosphorus modifications (e.g., pattern of “—XLR¹” groups in formula I).

[1407] The present disclosure provides compositions comprising or consisting of a plurality of provided oligonucleotides (e.g., chirally controlled oligonucleotide compositions). In some embodiments, all such provided oligonucleotides are of the same type, i.e., all have the same base sequence, pattern of backbone linkages (i.e., pattern of internucleotidic linkage types, for example, phosphate, phosphorothioate, etc), pattern of backbone chiral centers (i.e. pattern of linkage phosphorus stereochemistry (Rp/Sp)), and pattern of backbone phosphorus modifications (e.g., pattern of “—XLR¹” groups in formula I). In some embodiments, all oligonucleotides of the same type are identical. In many embodiments, however, provided compositions comprise a plurality of oligonucleotides types, typically in pre-determined relative amounts.

[1408] In some embodiments, a provided chirally controlled oligonucleotide composition comprises a combination of one or more provided oligonucleotide types. One of skill in the chemical and medicinal arts will recognize that the selection and amount of each of the one or more types of provided oligonucleotides in a provided composition will depend on the intended use of that composition. That is to say, one of skill in the relevant arts would design a provided chirally controlled oligonucleotide composition such that the amounts and types of provided oligonucleotides contained therein cause the composition as a whole to have certain desirable characteristics (e.g., biologically desirable, therapeutically desirable, etc.).

[1409] In some embodiments, a provided chirally controlled oligonucleotide composition comprises a combination of two or more provided oligonucleotide types. In some embodiments, a provided chirally controlled oligonucleotide composition comprises a combination of three or more provided oligonucleotide types. In some embodiments, a provided chirally controlled oligonucleotide composition comprises a combination of four or more provided oligonucleotide types. In some embodiments, a provided chirally controlled oligonucleotide composition comprises a combination of five or more provided oligonucleotide types. In some embodiments, a provided chirally controlled oligonucleotide composition comprises a combination of six or more provided oligonucleotide types. In some embodiments, a provided chirally controlled oligonucleotide composition comprises a combination of seven or more provided oligonucleotide types. In some embodiments, a provided chirally controlled oligonucleotide composition comprises a combination of eight or more provided oligonucleotide types. In some embodiments, a provided chirally controlled oligonucleotide composition comprises a combination of nine or more provided oligonucleotide types. In some embodiments, a provided chirally controlled oligonucleotide composition comprises a combination of ten or more provided oligonucleotide types. In some embodiments, a provided chirally controlled oligonucleotide composition comprises a combination of fifteen or more provided oligonucleotide types.

[1410] In some embodiments, a provided chirally controlled oligonucleotide composition is a combination of an amount of chirally uniform mipomersen of the Rp configuration and an amount of chirally uniform mipomersen of the Sp configuration.

[1411] In some embodiments, a provided chirally controlled oligonucleotide composition is a combination of an amount of chirally uniform mipomersen of the Rp configuration, an amount of chirally uniform mipomersen of the Sp configuration, and an amount of one or more chirally pure mipomersen of a desired diastereomeric form.

[1412] In some embodiments, a provided oligonucleotide type is selected from those described in WO/2014/012081 and WO/2015/107425, the oligonucleotides, oligonucleotide types, oligonucleotide compositions, and methods thereof of each of which are incorporated herein by reference. In some embodiments, a provided chirally controlled oligonucleotide composition comprises oligonucleotides of an oligonucleotide type selected from those described in WO/2014/012081 and WO/2015/107425.

### Incorporation of Lipids

[1413] Lipids can be incorporated into provided technologies through many types of methods in accordance with the present disclosure. In some embodiments, lipids are physically mixed with provided oligonucleotides to form provided compositions. In some embodiments, lipids are chemically conjugated with oligonucleotides.

[1414] In some embodiments, provided compositions comprise two or more lipids. In some embodiments, provided oligonucleotides comprise two or more conjugated lipids. In some embodiments, the two or more conjugated lipids are the same. In some embodiments, the two or more conjugated lipids are different. In some embodiments, provided oligonucleotides comprise no more than one lipid. In some embodiments, oligonucleotides of a provided composition comprise different types of conjugated lipids. In some embodiments, oligonucleotides of a provided composition comprise the same type of lipids.

[1415] Lipids can be conjugated to biologically active agents, e.g., oligonucleotides optionally through linkers. Various types of linkers in the art can be utilized in accordance of the present disclosure. In some embodiments, a linker comprise a phosphate group, which can, for example, be used for conjugating lipids through chemistry similar to those employed in oligonucleotide synthesis. In some embodiments, a linker comprises an amide, ester, or ether group. In some embodiments, a linker has the structure of -L^{LD}-. In some embodiments, a linker has the structure of -L-. In some embodiments, after conjugation to oligonucleotides, a lipid forms a moiety having the structure of -L^{LD}-R^{LD}, wherein each of L^{LD} and R^{LD} is independently as defined and described herein. In some embodiments, after conjugation to oligonucleotides, a lipid forms a moiety having the structure of -L-R^{LD}, wherein each of L and R^{LD} is independently as defined and described herein.

[1416] In some embodiments, -L- comprises a bivalent aliphatic chain. In some embodiments, -L- comprises a phosphate group. In some embodiments, -L- comprises a phosphorothioate group. In some embodiments, -L- has the structure of —C(O)NH—(CH₂)₆—OP(═O)(S⁻)—.

[1417] Lipids, optionally through linkers, can be conjugated to oligonucleotides at various suitable locations. In some embodiments, lipids are conjugated through the 5′-OH group. In some embodiments, lipids are conjugated through the 3′-OH group. In some embodiments, lipids are conjugated through one or more sugar moieties. In some embodiments, lipids are conjugated through one or more bases. In some embodiments, lipids are incorporated through one or more internucleotidic linkages. In some embodiments, an oligonucleotide may contain multiple conjugated lipids which are independently conjugated through its 5′-OH, 3′-OH, sugar moieties, base moieties and/or internucleotidic linkages.

[1418] As demonstrated in the present disclosure, conjugations of lipids with oligonucleotides can surprising improve properties of the oligonucleotides, such as safety, activity, delivery, etc.

### Certain Biological Applications and Use

[1419] As described herein, provided compositions and methods are capable of altering splicing of transcripts. In some embodiments, provided compositions and methods provide improved splicing patterns of transcripts compared to a reference pattern, which is a pattern from a reference condition selected from the group consisting of absence of the composition, presence of a reference composition, and combinations thereof. An improvement can be an improvement of any desired biological functions. In some embodiments, for example, in DMD, an improvement is production of an mRNA from which a dystrophin protein with improved biological activities is produced. In some other embodiments, for example, an improvement is down-regulation of STAT3, HNRNPH1 and/or KDR to mitigate tumor progression, malignancy, and angiogenesis through forced splicing-induced nonsense-mediated decay (DSD-NMD).

[1420] In some embodiments, the present disclosure provides a method for altering splicing of a target transcript, comprising administering a composition comprising a first plurality of oligonucleotides, wherein the splicing of the target transcript is altered relative to reference conditions selected from the group consisting of absence of the composition, presence of a reference composition, and combinations thereof.

[1421] In some embodiments, the present disclosure provides a method of generating a set of spliced products from a target transcript, the method comprising steps of: contacting a splicing system containing the target transcript with a provided composition, in an amount, for a time, and under conditions sufficient for a set of spliced products to be generated that is different from a set generated under reference conditions selected from the group consisting of absence of the lipids in the provided composition, the composition, presence of a reference composition, and combinations thereof.

[1422] As widely known in the art, many diseases and/or conditions are associated with transcript splicing. For examples, see Garcia-Blanco, et al., Alternative splicing in disease and therapy, Nat Biotechnol. 2004 May; 22(5):535-46; Wang, et al., Splicing in disease: disruption of the splicing code and the decoding machinery, Nat Rev Genet. 2007 October; 8(10):749-61; Havens, et al., Targeting RNA splicing for disease therapy, Wiley Interdiscip Rev RNA. 2013 May-June; 4(3):247-66; Perez, et al., Antisense mediated splicing modulation for inherited metabolic diseases: challenges for delivery, Nucleic Acid Ther. 2014 February; 24(1):48-56; etc. Additional example targets and/or disease are described in Xiong, et al., The human splicing code reveals new insights into the genetic determinants of disease, Science. 2015 Jan. 9; 347(6218):1254806. doi: 10.1126/science.1254806. In some embodiments, the present disclosure provides compositions and methods for treating or preventing diseases, including but not limited to those described in references cited in this disclosure.

[1423] In some embodiments, the present disclosure provides a method for treating or preventing a disease, comprising administering to a subject an oligonucleotide composition described herein.

[1424] In some embodiments, the present disclosure provides a method for treating or preventing a disease, comprising administering to a subject a provided oligonucleotide composition comprising a lipid and a first plurality of oligonucleotides to which the lipid is conjugated, which oligonucleotides:
[1425] 1) have a common base sequence complementary to a target sequence in a transcript; and
[1426] 2) comprise one or more modified sugar moieties and modified internucleotidic linkages,

[1427] the oligonucleotide composition being characterized in that, when it is contacted with the transcript in a transcript splicing system, splicing of the transcript is altered relative to that observed under reference conditions selected from the group consisting of absence of the lipid, absence of the composition, presence of a reference composition, and combinations thereof.

[1428] In some embodiments, the present disclosure provides a method for treating or preventing a disease, comprising administering to a subject an oligonucleotide composition comprising a lipid and a first plurality of oligonucleotides of a particular oligonucleotide type defined by:
[1429] 1) base sequence;
[1430] 2) pattern of backbone linkages;
[1431] 3) pattern of backbone chiral centers; and
[1432] 4) pattern of backbone phosphorus modifications,
   which composition is chirally controlled in that it is enriched, relative to a substantially racemic preparation of oligonucleotides having the same base sequence, for oligonucleotides of the particular oligonucleotide type, wherein:

[1433] the lipid is conjugated to one or more oligonucleotides of the first plurality; and

[1434] the oligonucleotide composition being characterized in that, when it is contacted with the transcript in a transcript splicing system, splicing of the transcript is altered relative to that observed under reference conditions selected from the group consisting of absence of the composition, presence of a reference composition, and combinations thereof.

[1435] In some embodiments, a disease is one in which, after administering a provided composition, one or more spliced transcripts repair, restore or introduce a new beneficial function. For example, in DMD, after skipping one or more exons, functions of dystrophin can be restored, or partially restored, through a truncated but (partially) active version. Other examples include but are not limited to those listed in Table ES1, ES2, or ES3. In some embodiments, a target is one listed in Table ES3 with “Correction of Aberrant Splicing”.

[1436] In some embodiments, a disease is one in which, after administering a provided composition, one or more spliced transcripts repair, a gene is effectively knockdown by altering splicing of the gene transcript. Examples include but are not limited to those listed in Table ES1, ES2, or ES3. In some embodiments, a target is one listed in Table ES3 with “Knockdown of Detrimental Gene Expression”.

[1437] In some embodiments, a disease is Duchenne muscular dystrophy. In some embodiments, a disease is spinal muscular atrophy. In some embodiments, a disease is cancer.

[1438] In some embodiments, the present disclosure provides a method of treating a disease by administering a composition comprising a first plurality of oligonucleotides sharing a common base sequence comprising a common base sequence, which nucleotide sequence is complementary to a target sequence in the target transcript,

[1439] the improvement that comprises using as the oligonucleotide composition a stereocontrolled oligonucleotide composition characterized in that 1) a lipid is conjugated to one or more oligonucleotides of the stereocontrolled oligonucleotide composition; and 2) when it is contacted with the transcript in a transcript splicing system, splicing of the transcript is altered relative to that observed under reference conditions selected from the group consisting of absence of the composition, presence of a reference composition, and combinations thereof.

[1440] In some embodiments, the present disclosure provides a method of treating a disease by administering a composition comprising a first plurality of oligonucleotides sharing a common base sequence comprising a common base sequence, which nucleotide sequence is complementary to a target sequence in the target transcript,

[1441] the improvement that comprises using as the oligonucleotide composition a stereocontrolled oligonucleotide composition characterized in that, 1) a lipid is conjugated to one or more oligonucleotides of the stereocontrolled oligonucleotide composition; and 2) when it is contacted with the transcript in a transcript splicing system, splicing of the transcript is altered relative to that observed under reference conditions selected from the group consisting of absence of the composition, presence of a reference composition, and combinations thereof.

[1442] In some embodiments, sequence of provide oligonucleotides is or comprises an element that is substantially complementary to a targeted element in a cellular nucleic acid. In some embodiments, a sequence is or comprises a sequence element that is associated with a muscle disease, disorder or condition. In some embodiments, a cellular nucleic acid is or comprises a transcript. In some embodiments, a cellular nucleic acid is or comprises a primary transcript. In some embodiments, a cellular nucleic acid is RNA. In some embodiments, a cellular nucleic acid is pre-mRNA. In some embodiments, a cellular nucleic acid is mRNA. In some embodiments, a cellular nucleic acid is or comprises genomic nucleic acid. In some embodiments, a sequence is or comprises an element that is substantially complementary to a targeted an RNA, and provided oligonucleotides of the sequence provide exon-skipping to form mRNA which are translated into proteins that have improved functions than proteins formed absence of the provided oligonucleotides. In some embodiments, such proteins with improved activities can restore or partially restore one or more muscular functions and can be used for treatment of muscle diseases, disorders and/or conditions.

[1443] In some embodiments, a common sequence of a plurality of oligonucleotides comprises a sequence selected from Table. In some embodiments, a common sequence is a sequence selected from Table ES1. In some embodiments, a common sequence is a sequence found is a transcript of any of the genes selected from Table ES1, ES2, and ES3.

[1444] Example diseases that can be treated include but are not limited to those described in Tables ES2 and ES3. In some embodiments, a disease is Duchenne muscular dystrophy. In some embodiments, a disease is spinal muscular atrophy. In some embodiments, a disease is cancer.

[1445] For Duchenne muscular dystrophy, example mutations and/or suitable DMD exons for skipping are widely known in the art, including but not limited to those described in U.S. Pat. Nos. 8,759,507, 8,486,907, and reference cited therein. In some embodiments, one or more skipped exons are selected from exon 2, 29, 40, 41, 42, 43, 44, 45, 46, 47, 48, 49, 50, 51 and 53. In some embodiments, exon 2 of DMD is skipped. In some embodiments, exon 29 of DMD is skipped. In some embodiments, exon 40 of DMD is skipped. In some embodiments, exon 41 of DMD is skipped. In some embodiments, exon 42 of DMD is skipped. In some embodiments, exon 43 of DMD is skipped. In some embodiments, exon 44 of DMD is skipped. In some embodiments, exon 45 of DMD is skipped. In some embodiments, exon 46 of DMD is skipped. In some embodiments, exon 47 of DMD is skipped. In some embodiments, exon 48 of DMD is skipped. In some embodiments, exon 49 of DMD is skipped. In some embodiments, exon 50 of DMD is skipped. In some embodiments, exon 51 of DMD is skipped. In some embodiments, exon 53 of DMD is skipped. In some embodiments, a skipped exon is any exon whose inclusion decreases a desired function of DMD. In some embodiments, a skipped exon is any exon whose skipping increased a desired function of DMD.

[1446] In some embodiments, for exon skipping of DMD transcript, or for treatment of DMD, a sequence of a provided plurality of oligonucleotides comprises a DMD sequence selected from Table ES1. In some embodiments, a sequence comprises one of SEQ ID Nos 1-30 of U.S. Pat. No. 8,759,507. In some embodiments, a sequence comprises one of SEQ ID Nos 1-211 of U.S. Pat. No. 8,486,907. In some embodiments, for exon skipping of DMD transcript, or for treatment of DMD, a sequence of a provided plurality of oligonucleotides is a DMD sequence selected from Table ES1. In some embodiments, a sequence is one of SEQ ID Nos 1-30 of U.S. Pat. No. 8,759,507. In some embodiments, a sequence is one of SEQ ID Nos 1-211 of U.S. Pat. No. 8,486,907. In some embodiments, a sequence comprises UCAAGGAAGAUGGCAUUUCU (SEQ ID NO: 1). In some embodiments, a sequence is UCAAGGAAGAUGGCAUUUCU (SEQ ID NO: 1). In some embodiments, a sequence comprises CTCCAACATCAAGGAAGATGGCATTTCTAG (SEQ ID NO: 9). In some embodiments, a sequence is CTCCAACATCAAGGAAGATGGCATTTCTAG (SEQ ID NO: 9).

[1447] In some embodiments, a sequence is selected from Table 4A. In some embodiments, a sequence is one described in Kemaladewi, et al., Dual exon skipping in myostatin and dystrophin for Duchenne muscular dystrophy, BMC Med Genomics. 2011 Apr. 20; 4:36. doi: 10.1186/1755-8794-4-36; or Malerba et al., Dual Myostatin and Dystrophin Exon Skipping by Morpholino Nucleic Acid Oligomers Conjugated to a Cell-penetrating Peptide Is a Promising Therapeutic Strategy for the Treatment of Duchenne Muscular Dystrophy, Mol Ther Nucleic Acids. 2012 Dec. 18; 1:e62. doi: 10.1038/mtna.2012.54.

[1448] In some embodiments, a disease treatment comprises knockdown of a gene function by altering its transcript splicing. Example disease and target genes include but are not limited to those listed in Table ES3, particularly those with labeled with “Knockdown of Detrimental Gene Expression”.

TABLE ES1
Example sequences (SEQ ID NOS 10-204,
respectively, in order of columns).

cccauuuugugaauguuuucuuuu
uuguguauuuacccauuuugug
Uauccucugaaugucgcauc
gguuauccucugaaugucgu
Gagccuuuuuucuucuuug
Uccuuucgucucugggcuc
Cuccucuuucuucuucugc
Cuucgaaacugagcaaauuu
cuugugagacaUgagug
cagagacuccucuugcuu
ugcugcugucuucuugcu
Uuguuaacuuuuucccauu
cgccgccauuucucaacag
TAGATAGCTATATAT
ATAGATAGCTATATA
TATAGATAGCTATAT
ATATAGATAGCTATA
GATATAGATAGCTAT
ATAGATAGCTAT
AGATATAGATAGCTA
TATAGATAGCTA
TAGATATAGATAGCT
ATATAGATAGCT
ATAGATATAGATAGC
GATATAGATAGC
TATAGATATAGATAG
AGATATAGATAG
ATATAGATATAGATA
TAGATATAGATA
TATATAGATATAGAT
ATAGATATAGAT
TATAGATATAGA
ATATAGATATAG
ATAGCTATATAGATA
AAAAAATAGCTATAT
GTTAAAAAAAATAGC
AGGAAGTTAAAAAAA
AATAAAGGAAGTTAA
AGGAAAATAAAGGAA
GTGTAAGGAAAATAA
ATTTTGTCTAAAACC
GATTTTGTCTAAAAC
TTTTGTCTAAAA
TGATTTTGTCTAAAA
ATTTTGTCTAAA
TTGATTTTGTCTAAA
GATTTTTGTCTAA
TTTGATTTTGTCTAA
TTTTGATTTTGTCTAA
TTTTGATTTTGTCTA
TGATTTTGTCTA
TTGATTTTGTCT
TTTTTGATTTTGTCT
TTTGATTTTGTC
CTTTTTGATTTTGTC
TTTTGATTTTGT
TTTTTGATTTTG
CTTCTTTTTGATTTT
CTTTTTGATTTT
TCTTTTTGATTT
CCTTCCTTCTTTTTG
GAGCACCTTCCTTCT
AATGTGAGCACCTTC
TAAGGAATGTGAGCA
AATTTAAGGAATGTGAGC
TTAAGGAATGTGAGC
TAATTTAAGGAATGTGAG
TTTAAGGAATGTGAG
AAGGAATGTGAG
TTAATTTAAGGAATGTGA
ATTTAAGGAATGTGA
TAAGGAATGTGA
CTTAATTTAAGGAATGTG
AATTTAAGGAATGTG
TTAAGGAATGTG
TAATTTAAGGAATGT
CCTTAATTTAAGGAATGT
TTTAAGGAATGT
TTAATTTAAGGAATG
ATTTAAGGAATG
CTTAATTTAAGGAAT
AATTTAAGGAAT
CCTTAATTTAAGGAA
TAATTTAAGGAA
TCCTTAATTTAAGGA
TTAATTTAAGGA
CTTAATTTAAGG
CCTTAATTTAAG
TGCTGGCAGACTTAC
CATAATGCTGGCAGA
TCATAATGCTGGCAG
TTCATAATGCTGGCA
TTTCATAATGCTGGC
ATTCACTTTCATAATGCTGG
CTTTCATAATGCTGG
TCATAATGCTGG
ACTTTCATAATGCTG
TTCATAATGCTG
CACTTTCATAATGCT
TTTCATAATGCT
TCACTTTCATAATGC
GTTTCATAATGC
TTCACTTTCATAATG
ACTTTCATAATG
ATTCACTTTCATAAT
CACTTTCATAAT
GATTCACTTTCATAA
TCACTTTCATAA
TTCACTTTCATA
ATTCACTTTCAT
AGTAAGATTCACTTT
ACAAAAGTAAGATTC
GTTTTACAAAAGTAA
ATAAAGTTTTACAAA
AAACCATAAAGTTTT
TCCACAAACCATAAA
ATT CAC TTT CAT AAT GCT GG
ATT CAC TTT CAT AAT GCT GG
ATT CAC TTT CAT AAT GCT GG
ATT CAC TTT CAT AAT GCT GG
ATT CAC TTT CAT AAT GCT GG
ATT CAC TTT CAT AAT GCT GG
ATT CAC TTT CAT AAT GCT GG
ATT CAC TTT CAT AAT GCT GG
CAC TTT CAT AAT GCT GG
CAC TTT CAT AAT GCT GG
CAC TTT CAT AAT GCT GG
CAC TTT CAT AAT GCT GG
CAC TTT CAT AAT GCT GG
CAC TTT CAT AAT GCT GG
CAC TTT CAT AAT GCT GG
CAC TTT CAT AAT GCT GG
CAC TTT CAT AAT GCT GG
CAC TTT CAT AAT GCT GG
TTT CAT AAT GCT GG
TTT CAT AAT GCT GG
TTT CAT AAT GCT GG
TTT CAT AAT GCT GG
TTT CAT AAT GCT GG
TTT CAT AAT GCT GG
TTT CAT AAT GCT GG
AAT GCT GGC AG
AAT GCT GGC AG
AAT GCT GGC AG
AAT GCT GGC AG
AAT GCT GGC AG
AAT GCT GGC AG
AAT GCT GGC AG
GCT GGC AG
GCT GGC AG
GCT GGC AG
GCT GGC AG
GCT GGC AG
GCT GGC AG
GCT GGC AG
GCT GGC AG
GCT GGC AG
C TAG TAT TTC CTG CAA ATG AG
C TAG TAT TTC CTG CAA ATG AG
C TAG TAT TTC CTG CAA ATG AG
C TAG TAT TTC CTG CAA ATG AG
C TAG TAT TTC CTG CAA ATG AG
C TAG TAT TTC CTG CAA ATG AG
C TAG TAT TTC CTG CAA ATG AG
C TAG TAT TTC CTG CAA ATG AG
C TAG TAT TTC CTG CAA ATG AG
C TAG TAT TTC CTG CAA ATG AG
C TAG TAT TTC CTG CAA ATG AG
C CAG CAT TTC CTG CAA ATG AG
C CAG CAT TTC CTG CAA ATG AG
C CAG CAT TTC CTG CAA ATG AG
C CAG CAT TTC CTG CAA ATG AG
C CAG CAT TTC CTG CAA ATG AG
C CAG CAT TTC CTG CAA ATG AG
C CAG CAT TTC CTG CAA ATG AG
C CAG CAT TTC CTG CAA ATG AG
C CAG CAT TTC CTG CAA ATG AG
A TGC CAG CAT TTC CTG CAA ATG AGA
A TGC CAG CAT TTC CTG CAA ATG AGA
A TGC CAG CAT TTC CTG CAA ATG AGA
A TGC CAG CAT TTC CTG CAA ATG AGA
A TGC CAG CAT TTC CTG CAA ATG AGA
A TGC CAG CAT TTC CTG CAA ATG AGA
A TGC CAG CAT TTC CTG CAA ATG AGA
A TGC CAG CAT TTC CTG CAA ATG AGA
GCT CTA TGC CAG CAT TTC CTG CAA A
GCT CTA TGC CAG CAT TTC CTG CAA A
GCT CTA TGC CAG CAT TTC CTG CAA A
GCT CTA TGC CAG CAT TTC CTG CAA A
GCT CTA TGC CAG CAT TTC CTG CAA A
GCT CTA TGC CAG CAT TTC CTG CAA A
GCT CTA TGC CAG CAT TTC CTG CAA A
GCT CTA TGC CAG CAT TTC CTG CAA A
GCT CTA TGC CAG CAT TTC CTG CAA A
GCT CTA TGC CAG CAT TTC CTG CAA A

SEQ ID Nos 1-30 of U.S. Pat. No. 8,759,507;
SEQ ID Nos 1-211 of U.S. Pat. No. U.S. Pat. No. 8,486,907;

TABLE ES2

| | | | | | | | |
|---|---|---|---|---|---|---|---|
| | | | | | Repeat | | |
| | | | Parent of | Repeat | number | Repeat | |
| | | | origin of | number | (pre- | number | Somatic |
| Disease | Sequence | Location | expansion | (normal) | mutation) | (disease) | instability |

Diseases with coding TNRs

| | | | | | | | |
|---|---|---|---|---|---|---|---|
| DRPLA | CAG | ATN1 (exon 5) | P | 6-35 | 35-48 | 49-88 | Yes |
| HD | CAG | HTT (exon 1) | P | 6-29 | 29-37 | 38-180 | Yes |
| OPMD | GCN | PABPN1 | P and M | 10 | 12-17 | >11 | None found in |
| | | (exon 1) | | | | | tissue tested |
| | | | | | | | (hypothalamus) |
| SCA1 | CAG | ATXN1 | P | 6-39 | 40 | 41-83 | Yes |
| | | (exon 8) | | | | | |
| SCA2 | CAG | ATXN2 | P | <31 | 31-32 | 32-200 | Unknown |
| | | (exon 1) | | | | | |
| SCA3 | CAG | ATXN3 | P | 12-40 | 41-85 | 52-86 | Unknown |
| (Machado- | | (exon 8) | | | | | |
| Joseph | | | | | | | |
| disease) | | | | | | | |
| SCA6 | CAG | CACNA1A | P | <18 | 19 | 20-33 | None found |
| | | (exon 47) | | | | | |
| SCA7 | CAG | ATXN7 | P | 4-17 | 28-33 | >36 | Yes |
| | | (exon 3) | | | | to >460 | |
| SCA17 | CAG | TBP (exon 3) | P > M | 25-42 | 43-48 | 45-66 | Yes |
| SMBA | CAG | AR (exon 1) | P | 13-31 | 32-39 | 40 | None found |

Diseases with non-coding TNRs

| | | | | | | | |
|---|---|---|---|---|---|---|---|
| DM1 | CTG | DMPK (3′ UTR) | M | 5-37 | 37-50 | <50 | Yes |
| DM2 | CCTG | CNBP | Uncertain | <30 | 31-74 | 75-11,000 | Yes |
| | | (intron 1) | | | | | |
| FRAX-E | GCC | AFF2 (5′ UTR) | M | 4-39 | 40-200 | >200 | Unknown |
| FRDA | GAA | FXN (intron 1) | Recessive | 5-30 | 31-100 | 70-1,000 | Yes |
| FXS | CGG | FMR1 (5′ UTR) | M | 6-50 | 55-200 | 200-4,000 | Yes |
| HDL2 | CTG | JPH3 (exon 2A) | M | 6-27 | 29-35 | 36-57 | Unknown |
| SCA8 | CTG | ATXN8OS | M | 15-34 | 34-89 | 89-250 | Unknown |
| | | (3′ UTR) | | | | | |
| SCA10 | ATTCT | ATXN10 | M and P | 10-29 | 29-400 | 400-4,500 | Yes |
| | | (intron 9) | (smaller | | | | |
| | | | changes | | | | |
| | | | with M) | | | | |
| SCA12 | CAG | PPP2R2B | M and P | 7-28 | 28-66 | 66-78 | None found |
| | | (5′ UTR) | (more | | | | |
| | | | unstable | | | | |
| | | | with P) | | | | |

AFF2, AF4/FMR2 family, member 2;
AR, androgen receptor;
ATN1, atrophin 1;
ATXN, ataxin;
ATXN8OS, ATXN8 opposite strand (non-protein coding);
CACNA1A, calcium channel, voltage-dependent, P/Q type, alpha 1A subunit;
CNBP, CCHC-type zinc finger nucleic acid binding protein;
DM, myotonic dystrophy;
DMPK, dystrophia myotonica-protein kinase;
DRPLA, dentatorubral-pallidoluysian atrophy;
FMR1, fragile × mental retardation 1;
FRAX-E, mental retardation, X-linked, associated with FRAXE;
FRDA, Friedreich's ataxia;
FXN, frataxin;
FXS, fragile × syndrome;
FXTAS, fragile X-associated tremor/ataxia syndrome;
HD, Huntington's disease;
HDL2, Huntington's disease-like 2;
HTT, huntingtin;
JPH3, junctophilin 3;
M, maternal;
OPMD, oculopharyngeal muscular dystrophy;
P, paternal;
PABPN1, poly(A) binding protein nuclear 1;
PPP2R2B, protein phosphatase 2, regulatory subunit B;
SCA, spinocerebellar ataxia;
SMBA, spinomuscular bulbar atrophy;
TBP, TATA-box binding protein;
TNR, trinucleotide repeat.

| | | Ataxia telangiectasia | ATM | |
|---|---|---|---|---|
| | | β-Thalassemia | HBB | |
| | | Cancer | BRCA2 | |
| | | CDG1A² | PMM2 | |
| | | Congenital adrenal insufficiency | CYP11A | |
| | | Cystic fibrosis | CFTR | |
| Bardet-Biedl syndrome | BBS1 | Duchenne muscular dystrophy | DMD | |
| β-Thalassemia | HBB | Fukuyama congenital muscular | FKTN | |
| | | dystrophy (FCMD) | | |
| Cancer | BRCA1 | Growth hormone insensitivity | GHR | |
| | PTCH1 | HPABH4A² | PTS | |
| Cystic fibrosis | CFTR | Hutchinson-Gilford progeria (HGPS) | LMNA | |
| Duchenne muscular | DMD | MLC1² | MLC1 | |
| dystrophy | | | | |
| Factor VII deficiency | F7 | Methylmalonic aciduria | MUT | |
| Familial dysautonomia | IKBKAP | Myopathy with lactic acidosis | iSCU | |
| Fanconi anemia | FANCC | Myotonic dystrophy | CLC1 | |
| Hemophilia A | F9 | Neurofibromatosis | NF1 | |
| Propionic acidemia | PCCA | Niemann-Pick type C | NPC1 | |
| Retinitis pigmentosa | RHO | Propionic acidemia | PCCB | |
| | RPGR | Usher syndrome | USH1C | |
| | | Alzheimer's disease/FTDP-17 | MAPT | |
| | | Taupathies | | |
| | | Cancer | BCL2L1 | |
| | | | FGFR1 | |
| | | | MCL1 | |
| | | | MDM2 | |
| Afibrinogenemia | FGB | | Multiple | |
| Cancer | BRCA1 | | PKM | |
| Propionic acidemia | PCCA | | MST1R | |
| Neurofibromatosis | NF1 | | USP5 | |
| Ocular albinism type 1 | GRP143 | Spinal muscular atrophy | SMN2 | |
| Alzheimer's disease | BACE1 | | | |
| Cancer | CDKN1A | | | |
| | ERBB2 | | | |
| | FLT1 | | | |
| | HNRNPH1 | | | |
| | KDR | | | |
| | MYC | | | |
| | Multiple | | | |
| | PHB | | | |
| | SRA1 | | | |
| | STAT3 | | | |
| | TERT | | | |
| | WT1 | Duchenne muscular dystrophy | DMD | |
| FHBL/atherosclerosis² | APOB | | | |
| Immune-response | CD40 | | | |
| Inflammatory disease | TNFRSF1B | | | |
| | IL5RA | | | |
| Influenza virus | TMPRSS2 | Dystrophic epidermolysis bullosa | COL7A1 | |
| Muscle wasting diseases | MSTN | | | |
| Spinocerebellar ataxia | ATXN1 | Miyoshi myopathy | DYSF | |
| type 1 | | | | |
| Gene | Effect | Disease | Variant location | Effect on splicing/protein |

Modifies disease phenotype

| | | | | |
|---|---|---|---|---|
| CFTR | cis | Cystic fibrosis | (TG)n and Tn polymorphisms | Affects the amount of exon 9 skipping |
| | | | in CFTR intron 8 | |
| MCAD | cis | Medium-chain acyl-CoA | ESS within exon 5 | Prevents effect of disease-causing |
| | | dehydrogenase deficiency | | ESE mutation |
| SCN1A | cis | Susceptibility to anti- | 5′ splice site of neonatal | Increased use of neonatal alternative |
| | | epileptics | alternative exon | exon |
| CFTR | cis and | Cystic fibrosis | Point mutation in intron 19 creates a | Variable level of cryptic exon |
| | trans | | variably spliced 84-nucleotide exon | inclusion influences severity |
| IKBKAP | trans | Familial | n/a | Tissue-specific differences in |
| | | dysautonomia | | recognition of mutant 5′ splice site |
| Scn8a | cis and | Neurological disorder | 4-bp deletion within the 5′-splice | 5′ splice-site mutation modified by |
| | trans | (mouse) | site of exon 3 | Scnm1 |

Linked with disease susceptibility

| | | | | |
|---|---|---|---|---|
| IRF5 | cis | Systemic lupus | One SNP between alternative | SNP creates 5′ splice site and new |
| | | erythematosus (SLE) | promoters creates 5′ splice site | first exon |
| CTLA4 | cis | Autoimmune diseases | Two SNPs in 3′ UTR (exon 4) | Increased exon 3 skipping; reduced |
| | | | | soluble isoform |
| NCAM1 | cis | Bipolar disorder | Two SNPs, one within cluster | Decreased expression of secreted |
| | | | of alternative exons | splice variants |
| ERBB4 | cis | Schizophrenia | One SNP in intron 12 and | Increased use of exons 16 and 26 |
| | | | SNPs near exon 3 linked with | |
| | | | splicing of exons 16 and 26, | |
| | | | respectively | |
| OLR1 | cis | Myocardial infarction | Six SNPs; three in intron 4, | Exon 5 skipping results in an |
| | | | two in intron 5, one in | isoform with reduced |
| | | | the 3′ UTR in exon 6 | apoptotic effects |
| OAS1 | cis | Type 1 diabetes | Intron 6 AG→AA variant shifts | SNP moves splice site by 1 nucleotide |
| | | | 3′ splice site by 1 nucleotide, | resulting in a longer protein |
| | | | changing the reading frame | |
| TNNT2 | cis | Cardiac hypertrophy | 5-bp deletion affects intron | Results in E4 skipping (minigene |
| | | | 3 splice site | analysis) |
| GPRA | cis | Asthma | Three SNPs distal to alternative site | Increased use of the more distal of |
| | | | | two terminal exons |
| MAPT | cis | Tauopathies | 238-bp insertion into intron 9 | Enhanced exon 10 inclusion |
| PTPRC | cis | Altered immune | A138G polymorphism exon 6 | Enhanced exon 6 skipping |
| (CD45) | | function | | |
| PTPRC | cis | Multiple sclerosis | C77G polymorphism exon 4 | Enhanced exon 4 inclusion |
| (CD45) | | | | |
| LDLR | cis | Elevated cholesterol | C688T polymorphism exon 12 | Enhanced exon 12 skipping |
| SFRS8 | trans | Asthma | n/a | None reported |

| Splicing factorª | OMIM number^{b} | Disease association^{c} |
|---|---|---|
| CUG triplet repeat, RNA-binding protein 1; | 601074 | Myotonic dystrophy (DM) |
| CUGBP1 (CUGBP; NAB50; BRUNOL2) | | |
| CUG triplet repeat, RNA-binding protein 2; | 602538 | Myotonic dystrophy (DM) |
| CUGBP2 (ETR3) | | |
| FUS-interacting protein I; FUSIP1 | 605221 | Leukemias and sarcomas |
| (TASR(1 or 2); SRp38; SRRp40; NSSR) | | |
| Fusion, derived from 12-16 translocation, | 137070 | Liposarcomas, acute myeloid |
| malignant liposarcoma; FUS ( TLS) | | leukemia (AML) |
| Glycogen synthase kinase 3-BETA; GSK3B (GSK-3ß) | 605004 | Alzheimer disease (AD) |
| Hydroxymethylglutaryl coenzyme A1a | 600701 | Alzheimer disease (AD) |
| (HMGA1a) (HMG-I) | | |
| Muscleblind-like protein 1; MBNL1 (MBNL) | 606516 | Myotonic dystrophy (DM) |
| Muscleblind-like protein 2; MBNL2 (MBLL) | 607327 | Myotonic dystrophy (DM) |
| Muscleblind-like protein 3; MBNL3 (MBXL) | 300413 | Myotonic dystrophy (DM) |
| Neurooncologic ventral antigen 1; NOVA1 (Ri Ag) | 602157 | Paraneoplastic syndrome |
| Precursor mRNA-processing factor 3, | 607301 | Retinitis pigmentosa |
| Saccharomyces cerevisiae, homolog of | | |
| PRPF3 (PRP3; HPRP3) | | |
| Precursor mRNA-processing factor 31, | 606419 | Retinitis pigmentosa |
| S. cerevisiae, homolog of PRPF31 (PRP31) | | |
| Precursor mRNA-processing factor 8, | 607300 | Retinitis pigmentosa |
| S. cerevisiae, homolog of PRPF8 (PRP8 | | |
| PRPC8 U5 snRNP-specific protein, 220-K; p220) | | |
| RNA-binding motif protein, Y chromosome | 400006 | Azospermia |
| family 1, member A1; RBMY1A1 | | |
| (RBMY; RBM1; RBM2; YRRM1; YRRM2) | | |
| Splicing factor HCC1 (HCC1.3; HCC1.4) | 604739 | Hepatocellular carcinoma |
| Splicing factor, proline- and glutamine-rich SFPQ (PSF) | 605199 | Papillary renal cell carcinoma |
| Survival of motor neuron 1, telomeric: | 600354 | Spinal muscular atrophy |
| SMN1 (SMN; SMNT; T-BCD541) | | |
| Survival of motor neuron 2, centromeric, | 601627 | Spinal muscular atrophy |
| SMN2 (SMNC; C-BCD541) | | |
| Tumor protein p73-like: TP73L p(63) | 603273 | Hay-Wells syndrome |

| Disease | Human Target Gene | Gene Defects | Therapeutic modality | Approaches |
|---|---|---|---|---|
| Cancer | BRCA1 | Splice Site Mutations | ASO | Correction of Aberrant Splicing |
| Cancer | PTCH1 | Splice Site Mutations | ASO | Correction of Aberrant Splicing |
| Duchenne muscular | DMD | Splice Site Mutations | ASO | Correction of Aberrant Splicing |
| dystrophy | | | | |
| Ataxia telangiectasia | ATM | Cryptic Splice Sites | ASO | Correction of Aberrant Splicing |
| Beta-thalassemia | HBB | Cryptic Splice Sites | ASO | Correction of Aberrant Splicing |
| Cancer | BRCA2 | Cryptic Splice Sites | ASO | Correction of Aberrant Splicing |
| CDG1A | PMM2 | Cryptic Splice Sites | ASO | Correction of Aberrant Splicing |
| Congenital adrenal | CYP11A | Cryptic Splice Sites | ASO | Correction of Aberrant Splicing |
| insufficiency | | | | |
| Cystic fibrosis | CFTR | Cryptic Splice Sites | ASO | Correction of Aberrant Splicing |
| Duchenne muscular | DMD | Cryptic Splice Sites | ASO | Correction of Aberrant Splicing |
| dystrophy | | | | |
| Fukuyama congenital | FKTN | Cryptic Splice Sites | ASO | Correction of Aberrant Splicing |
| muscular dystrophy | | | | |
| (FCMD) | | | | |
| Growth hormone | GHR | Cryptic Splice Sites | ASO | Correction of Aberrant Splicing |
| insensitivity | | | | |
| HPABH4A | PTS | Cryptic Splice Sites | ASO | Correction of Aberrant Splicing |
| Hutchinson-Gilford | LMNA | Cryptic Splice Sites | ASO | Correction of Aberrant Splicing |
| progeria (HGPS) | | | | |
| MLC1 | MLC1 | Cryptic Splice Sites | ASO | Correction of Aberrant Splicing |
| Methylmalonic aciduria | MUT | Cryptic Splice Sites | ASO | Correction of Aberrant Splicing |
| Myopathy with lactic | ISCU | Cryptic Splice Sites | ASO | Correction of Aberrant Splicing |
| acidosis | | | | |
| Myotonic dystrophy | CLC1 | Cryptic Splice Sites | ASO | Correction of Aberrant Splicing |
| Neurofibromatosis | NF1 | Cryptic Splice Sites | ASO | Correction of Aberrant Splicing |
| Niemann-Pick type C | NPC1 | Cryptic Splice Sites | ASO | Correction of Aberrant Splicing |
| Propionic acidemia | PCCB | Cryptic Splice Sites | ASO | Correction of Aberrant Splicing |
| Usher syndrome | USH1C | Cryptic Splice Sites | ASO | Correction of Aberrant Splicing |
| Afibrinogenemia | FGB | Regulatory Sequence | ASO | Correction of Aberrant Splicing |
| | | Mutations | | |
| Cancer | BRCA1 | Regulatory Sequence | ASO | Correction of Aberrant Splicing |
| | | Mutations | | |
| Propionic acidemia | PCCA | Regulatory Sequence | ASO | Correction of Aberrant Splicing |
| | | Mutations | | |
| Ocular albinism type 1 | GRP143 | Regulatory Sequence | ASO | Correction of Aberrant Splicing |
| | | Mutations | | |
| Alzheimer's | MAPT | Deregulated Alternative | ASO | Correction of Aberrant Splicing |
| disease/FTDP-17 Taupathies | | Splicing | | |
| Cancer | BCL2L1 | Deregulated Alternative | ASO | Correction of Aberrant Splicing |
| | | Splicing | | |
| Cancer | FGFR1 | Deregulated Alternative | ASO | Correction of Aberrant Splicing |
| | | Splicing | | |
| Cancer | MCL1 | Deregulated Alternative | ASO | Correction of Aberrant Splicing |
| | | Splicing | | |
| Cancer | MDM2 | Deregulated Alternative | ASO | Correction of Aberrant Splicing |
| | | Splicing | | |
| Cancer | PKM | Deregulated Alternative | ASO | Correction of Aberrant Splicing |
| | | Splicing | | |
| Cancer | MST1R | Deregulated Alternative | ASO | Correction of Aberrant Splicing |
| | | Splicing | | |
| Cancer | USP5 | Deregulated Alternative | ASO | Correction of Aberrant Splicing |
| | | Splicing | | |
| Spinal muscular atrophy | SMN2 | Deregulated Alternative | ASO | Correction of Aberrant Splicing |
| | | Splicing | | |
| Alzheimer's disease | BACE1 | Detrimental | ASO | Knockdown of Detrimental |
| | | Gene Expression | | Gene Expression |
| Cancer | ERBB2 | Detrimental | ASO | Knockdown of Detrimental |
| | | Gene Expression | | Gene Expression |
| Cancer | FLT1 | Detrimental | ASO | Knockdown of Detrimental |
| | | Gene Expression | | Gene Expression |
| Cancer | HNRNPH1 | Detrimental | ASO | Knockdown of Detrimental |
| | | Gene Expression | | Gene Expression |
| Cancer | KDR | Detrimental | ASO | Knockdown of Detrimental |
| | | Gene Expression | | Gene Expression |
| Cancer | SRA1 | Detrimental | ASO | Knockdown of Detrimental |
| | | Gene Expression | | Gene Expression |
| Cancer | STAT3 | Detrimental | ASO | Knockdown of Detrimental |
| | | Gene Expression | | Gene Expression |
| Cancer | TERT | Detrimental | ASO | Knockdown of Detrimental |
| | | Gene Expression | | Gene Expression |
| Cancer | WT1 | Detrimental | ASO | Knockdown of Detrimental |
| | | Gene Expression | | Gene Expression |
| FHBL/atherosclerosis | APOB | Detrimental | ASO | Knockdown of Detrimental |
| | | Gene Expression | | Gene Expression |
| Immune-response | CD40 | Detrimental | ASO | Knockdown of Detrimental |
| | | Gene Expression | | Gene Expression |
| Inflammatory disease | TNFRSF1B | Detrimental | ASO | Knockdown of Detrimental |
| | | Gene Expression | | Gene Expression |
| Inflammatory disease | IL5RA | Detrimental | ASO | Knockdown of Detrimental |
| | | Gene Expression | | Gene Expression |
| Influenza virus | TMPRSS2 | Detrimental | ASO | Knockdown of Detrimental |
| | | Gene Expression | | Gene Expression |
| Muscle wasting diseases | MSTN | Detrimental | ASO | Knockdown of Detrimental |
| | | Gene Expression | | Gene Expression |
| Spinocerebellar | ATXN1 | Detrimental | ASO | Knockdown of Detrimental |
| ataxia type 1 | | Gene Expression | | Gene Expression |
| Duchenne muscular | DMD | RNA Reframing | ASO | RNA Reframing |
| dystrophy | | | | |
| Dystrophic | COL7A1 | RNA Reframing | ASO | RNA Reframing |
| epidermolysis bullosa | | | | |
| Miyoshi myopathy | DYSF | RNA Reframing | ASO | RNA Reframing |

| Beta-thalassemia | HBB | Splice Site Mutations |
|---|---|---|
| Alzheimer's disease/FTDP-17 Taupathies | MAPT | Deregulated Alternative Splicing |
| Spinal muscular atrophy | SMN2 | Deregulated Alternative Splicing |
| Dystrophic epidermolysis bullosa | COL7A1 | RNA Reframing |
| Familial dysautonomia | IKBKAP | Splice Site Mutations |
| Cystic fibrosis | CFTR | Cryptic Splice Sites |
| Neurofibromatosis | NF1 | Regulatory Sequence Mutations |
| Alzheimer's disease/FTDP-17 Taupathies | MAPT | Deregulated Alternative Splicing |
| Cancer | Multiple | Deregulated Alternative Splicing |
| Spinal muscular atrophy | SMN2 | Deregulated Alternative Splicing |
| Cancer | CDKN1A | Detrimental Gene Expression |
| Cancer | MYC | Detrimental Gene Expression |
| Cancer | Multiple | Detrimental Gene Expression |
| Cancer | PHB | Detrimental Gene Expression |
| Duchenne muscular dystrophy | DMD | RNA Reframing |
| Cystic Fibrosis | CFTR | Splice Site Mutations |
| Factor VII deficiency | F7 | Splice Site Mutations |
| Fanconi anemia | FANCC | Splice Site Mutations |
| Hemophilia A | F9 | Splice Site Mutations |
| Propionic acidemia | PCCA | Splice Site Mutations |
| Retinitis pigmentosa | RHO | Splice Site Mutations |
| Retinitis pigmentosa | RPGR | Splice Site Mutations |
| Spinal muscular atrophy | SMN2 | Deregulated Alternative Splicing |
| Bardet-Biedl syndrome | BBS1 | Splice Site Mutations |

| Disease | Human Target Gene | Therapeutic | Stage |
|---|---|---|---|
| Bardet-Biedl syndrome | BBS1 | U1/U6 snRNA* | Patient cells |
| Beta-thalassemia | HBB | PTM | Minigene |
| Cancer | BRCA1 | ASO | Minigene |
| Cancer | PTCH1 | ASO | Minigene |
| Cystic Fibrosis | CFTR | U1 snRNA* | Minigene |
| Duchenne muscular dystrophy | DMD | ASO | Canine model |
| Factor VII deficiency | F7 | U1 snRNA* | Minigene |
| Familial dysautonomia | IKBKAP | SM | Patients |
| Fanconi anemia | FANCC | U1 snRNA* | Patient cells |
| Hemophilia A | F9 | U1 snRNA* | Minigene |
| Propionic acidemia | PCCA | U1 snRNA* | Patient cells |
| Retinitis pigmentosa | RHO | U1 snRNA* | Minigenes |
| Retinitis pigmentosa | RPGR | U1 snRNA* | Patient cells |
| Ataxia telangiectasia | ATM | ASO | Patient cells |
| Beta-thalassemia | HBB | ASO | Mouse model |
| Cancer | BRCA2 | ASO | Minigene |
| CDG1A | PMM2 | ASO | Patient cells |
| Congenital adrenal insufficiency | CYP11A | ASO | Minigene |
| Cystic fibrosis | CFTR | ASO | Cell lines |
| Cystic fibrosis | CFTR | SM | Patient cells |
| Duchenne muscular dystrophy | DMD | ASO | Patient cells |
| Fukuyama congenital muscular | FKTN | ASO | Mouse model |
| dystrophy (FCMD) | | | |
| Growth hormone insensitivity | GHR | ASO | Minigene |
| HPABH4A | PTS | ASO | Patient cells |
| Hutchinson-Gilford progeria | LMNA | ASO | Mouse model |
| (HGPS) | | | |
| MLC1 | MLC1 | ASO | Minigene |
| Methylmalonic aciduria | MUT | ASO | Patient cells |
| Myopathy with lactic acidosis | ISCU | ASO | Patient cells |
| Myotonic dystrophy | CLC1 | ASO | Mouse model |
| Neurofibromatosis | NF1 | ASO | Patient cells |
| Niemann-Pick type C | NPC1 | ASO | Patient cells |
| Propionic acidemia | PCCB | ASO | Patient cells |
| Usher syndrome | USH1C | ASO | Mouse model |
| Afibrinogenemia | FGB | ASO | Minigene |
| Cancer | BRCA1 | ASO | In vitro |
| Propionic acidemia | PCCA | ASO | Patient cells |
| Neurofibromatosis | NF1 | SM | Patient cells |
| Ocular albinism type 1 | GRP143 | ASO | Patient cells |
| Alzheimer's disease/FTDP-17 | MAPT | ASO | Cell lines |
| Taupathies | | | |
| Alzheimer's disease/FTDP-17 | MAPT | PTM | Minigene |
| Taupathies | | | |
| Alzheimer's disease/FTDP-17 | MAPT | SM | Cell lines |
| Taupathies | | | |
| Cancer | BCL2L1 | ASO | Mouse model |
| Cancer | FGFR1 | ASO | Cell lines |
| Cancer | MCL1 | ASO | Cell lines |
| Cancer | MDM2 | ASO | Cell lines |
| Cancer | Multiple | SM | Cell lines |
| Cancer | PKM | ASO | Cell lines |
| Cancer | MST1R | ASO | Cell lines |
| Cancer | USP5 | ASO | Cell lines |
| Spinal muscular atrophy | SMN2 | ASO | Clinical |
| Spinal muscular atrophy | SMN2 | SM | Clincal trials |
| Spinal muscular atrophy | SMN2 | U1 snRNA* | Minigene |
| Spinal muscular atrophy | SMN2 | PTM | Mouse model |
| Alzheimer's disease | BACE1 | ASO | Cell lines |
| Cancer | CDKN1A | SM | Cell lines |
| Cancer | ERBB2 | ASO | Cell lines |
| Cancer | FLT1 | ASO | Mouse model |
| Cancer | HNRNPH1 | ASO | Patient cells |
| Cancer | KDR | ASO | Mouse model |
| Cancer | MYC | SM | Cell lines |
| Cancer | Multiple | SM | Clinical trials |
| | | | phase I, E7107 |
| Cancer | PHB | SM | Cell lines |
| Cancer | SRA1 | ASO | Cell lines |
| Cancer | STAT3 | ASO | Mouse model |
| Cancer | TERT | ASO | Cell lines |
| Cancer | WT1 | ASO | Cell lines |
| FHBL/atherosclerosis | APOB | ASO | Cell lines |
| Immune-response | CD40 | ASO | Cell lines |
| Inflammatory disease | TNFRSF1B | ASO | Mouse model |
| Inflammatory disease | IL5RA | ASO | Cell lines |
| Influenza virus | TMPRSS2 | ASO | Cell lines |
| Muscle wasting diseases | MSTN | ASO | Mouse model |
| Spinocerebellar ataxia type 1 | ATXN1 | ASO | Cell lines |
| Duchenne muscular dystrophy | DMD | ASO | Clinical |
| Duchenne muscular dystrophy | DMD | SM | Cell lines |
| Dystrophic epidermolysis | COL7A1 | ASO | Explants |
| bullosa | | | |
| Dystrophic epidermolysis | COL7A1 | PTM | Patient cells |
| bullosa | | | |
| Miyoshi myopathy | DYSF | ASO | Patient cells |

[1449] In some embodiments, a provided oligonucleotide composition is administered at a dose and/or frequency lower than that of an otherwise comparable reference oligonucleotide composition with comparable effect in altering the splicing of a target transcript. In some embodiments, a stereocontrolled oligonucleotide composition is administered at a dose and/or frequency lower than that of an otherwise comparable stereorandom reference oligonucleotide composition with comparable effect in altering the splicing of the target transcript. If desired, a provided composition can also be administered at higher dose/frequency due to its lower toxicities.

[1450] In some embodiments, the present disclosure recognizes that properties, e.g., activities, toxicities, etc. of oligonucleotides and compositions thereof can be optimized by chemical modifications and/or stereochemistry. In some embodiments, the present disclosure provides methods for optimizing oligonucleotide properties through chemical modifications and stereochemistry. In some embodiments, the present disclosure provides oligonucleotides and compositions and methods thereof with low toxicities. In some embodiments, the present disclosure provides oligonucleotides and compositions and methods thereof with low toxicities and enhanced activities (e.g., target-inhibition efficiency, specificity, cleavage rates, cleavage pattern, etc.). In some embodiments, the present disclosure provides oligonucleotides and compositions and methods thereof with improved protein binding profile. In some embodiments, the present disclosure provides oligonucleotides and compositions and methods thereof with improved protein binding profile and enhanced activities. In some embodiments, the present disclosure provides oligonucleotides and compositions and methods thereof with improved delivery and enhanced activities.

[1451] In some embodiments, provided oligonucleotides, compositions and methods have low toxicities, e.g., when compared to a reference composition. As widely known in the art, oligonucleotides can induce toxicities when administered to, e.g., cells, tissues, organism, etc. In some embodiments, oligonucleotides can induce undesired immune response. In some embodiments, oligonucleotide can induce complement activation. In some embodiments, oligonucleotides can induce activation of the alternative pathway of complement. In some embodiments, oligonucleotides can induce inflammation. Among other things, the complement system has strong cytolytic activity that can damages cells and should therefore be modulated to reduce potential injuries. In some embodiments, oligonucleotide-induced vascular injury is a recurrent challenge in the development of oligonucleotides for e.g., pharmaceutical use. In some embodiments, a primary source of inflammation when high doses of oligonucleotides are administered involves activation of the alternative complement cascade. In some embodiments, complement activation is a common challenge associated with phosphorothioate-containing oligonucleotides, and there is also a potential of some sequences of phosphorothioates to induce innate immune cell activation. In some embodiments, cytokine release is associated with administration of oligonucleotides. For example, in some embodiments, increases in interleukin-6 (IL-6) monocyte chemoattractant protein (MCP-1) and/or interleukin-12 (IL-12) is observed. See, e.g., Frazier, Antisense Oligonucleotide Therapies: The Promise and the Challenges from a Toxicologic Pathologist's Perspective. Toxicol Pathol., 43: 78-89, 2015; and Engelhardt, et al., Scientific and Regulatory Policy Committee Points-to-consider Paper: Drug-induced Vascular Injury Associated with Nonsmall Molecule Therapeutics in Preclinical Development: Part 2. Antisense Oligonucleotides. Toxicol Pathol. 43: 935-944, 2015.

[1452] By controlling of chemical modifications and/or stereochemistry, the present disclosure provides improved oligonucleotide compositions and methods. In some embodiments, provided oligonucleotides comprise chemical modifications. In some embodiments, provided oligonucleotides comprise base modifications, sugar modifications, internucleotidic linkage modifications, or any combinations thereof. In some embodiments, provided oligonucleotides comprise base modifications. In some embodiments, provided oligonucleotides comprise sugar modifications. In some embodiments, provided oligonucleotides comprises 2′-modifications on the sugar moieties. In some embodiments, the present disclosure demonstrates that 2′-modifications can lower toxicity. In some embodiments, provided oligonucleotides comprises one or more modified internucleotidic linkages and one or more natural phosphate linkages. In some embodiments, the present disclosure demonstrates that incorporation of one or more natural phosphate linkages into oligonucleotides comprising one or more modified internucleotidic linkages can lower toxicity. A natural phosphate linkage can be incorporated into various locations of an oligonucleotide. In some embodiments, a natural phosphate linkage is incorporated into a wing region, or a region close to the 5′- or the 3′-end. In some embodiments, a natural phosphate linkage is incorporated into the middle of an oligonucleotide. In some embodiments, a natural phosphate linkage is incorporated into a core region. In some embodiments, the present disclosure demonstrates that stereochemistry, either alone or in combination with chemical modifications, can modulate toxicity. In some embodiments, the present disclosure demonstrates that stereochemistry, either alone or in combination with chemical modifications, can modulate immune response. In some embodiments, the present disclosure demonstrates that stereochemistry, either alone or in combination with chemical modifications, can modulate complement activation. It is surprisingly found that a chirally controlled oligonucleotide composition of an individual stereoisomer can have dramatically different toxicity profile, e.g., complement activation, compared to the corresponding stereorandom composition, and/or a chirally controlled oligonucleotide composition of another individual stereoisomer. In some embodiments, the present disclosure demonstrates that stereochemistry, either alone or in combination with chemical modifications, can modulate complement activation via the alternative pathway. Example chemical modifications, stereochemistry and patterns thereof are extensively described in this disclosure, and they can be used in combinations. Example compositions and methods of are also extensively described in this disclosure. A person having ordinary skill in the art understands that methods and compositions described herein can be used to either increase or decrease immune responses, including complement activation, relative to a reference composition.

[1453] Delivery of oligonucleotides to target locations can benefit conjugation with lipids. In some embodiments, the present disclosure provides a method comprising administering a provided composition, which composition displays improved delivery as compared with a reference composition which does not comprise the lipids in the provided composition.

[1454] In some embodiments, provided oligonucleotides, compositions and methods provide improved cytoplasmatic delivery. In some embodiments, improved delivery is to a population of cells. In some embodiments, improved delivery is to a tissue. In some embodiments, improved delivery is to an organ. In some embodiments, improved delivery is to an organism. In some embodiments, improved delivery is to muscle.

[1455] In some embodiments, a reference oligonucleotide composition of a provided oligonucleotide composition is a comparable composition absence of the lipids in the provided composition. In some embodiments, a reference oligonucleotide composition is a stereorandom oligonucleotide composition. In some embodiments, a reference oligonucleotide composition is a stereorandom composition of oligonucleotides of which all internucleotidic linkages are phosphorothioate. In some embodiments, a reference oligonucleotide composition is a DNA oligonucleotide composition with all phosphate linkages. In some embodiments, a reference composition is a composition of oligonucleotides having the same base sequence and the same chemical modifications. In some embodiments, a reference composition is a composition of oligonucleotides having the same base sequence and the same pattern of chemical modifications. In some embodiments, a reference composition is a chirally un-controlled (or stereorandom) composition of oligonucleotides having the same base sequence and chemical modifications. In some embodiments, a reference composition is a composition of oligonucleotides having the same base sequence but different chemical modifications. In some embodiments, a reference composition is a composition of oligonucleotides having the same base sequence, base modifications, internucleotidic linkage modifications but different sugar modifications. In some embodiments, a reference composition has fewer 2′-modified sugar modifications. In some embodiments, a reference composition is a composition of oligonucleotides having the same base sequence, base modifications, sugar modifications but different internucleotidic linkage modifications. In some embodiments, a reference composition has more internucleotidic linkage modifications. In some embodiments, a reference composition has fewer natural phosphate linkages. In some embodiments, a reference composition comprising oligonucleotides having no natural phosphate linkages. In some embodiments, a reference composition is a composition comprising a reference plurality of oligonucleotides wherein individual oligonucleotides within the reference plurality differ from one another in stereochemical structure. In some embodiments, a reference composition is a composition comprising a reference plurality of oligonucleotides, wherein at least some oligonucleotides within the reference plurality have a structure different from a structure represented by a plurality of oligonucleotides of a composition compared to the reference composition. In some embodiments, a reference composition is a composition comprising a reference plurality of oligonucleotides wherein at least some oligonucleotides within the reference plurality do not comprise a wing region and a core region. In some embodiments, a reference oligonucleotide composition comprises a reference plurality of oligonucleotides having the same common nucleotide sequence but lacking at least one of the one or more modified sugar moieties in oligonucleotides of the oligonucleotide composition compared to the reference composition. In some embodiments, a reference oligonucleotide composition comprises a reference plurality of oligonucleotides having the same common nucleotide sequence but have no modified sugar moieties. In some embodiments, a reference oligonucleotide composition comprises a reference plurality of oligonucleotides having the same common nucleotide sequence but do not comprise natural phosphate linkages. In some embodiments, a reference composition is a chirally controlled oligonucleotide composition of oligonucleotides having the same chemical modification patterns. In some embodiments, a reference composition is a chirally controlled oligonucleotide composition of another stereoisomer.

[1456] In some embodiments, provided oligonucleotides comprise one or more structural elements (e.g., modifications, stereochemistry, patterns, etc.) that oligonucleotides of the reference plurality do not all have. Such structural elements can be any one described in this disclosure.

[1457] In some embodiments, oligonucleotides of a provided composition comprise more phosphorothioate linkages than oligonucleotides of the reference composition. In some embodiments, oligonucleotides of a provided composition comprise more phosphorothioate linkages than oligonucleotides of the reference composition at the 5′-end region. In some embodiments, oligonucleotides of a provided composition comprise more phosphorothioate linkages than oligonucleotides of the reference composition at the 3′-end region. In some embodiments, oligonucleotides of a provided composition comprise more phosphorothioate linkages in a wing region than the corresponding region of oligonucleotides of the reference composition. In some embodiments, oligonucleotides of a provided composition comprise more phosphorothioate linkages in each wing region than the corresponding regions in oligonucleotides of the reference composition. In some embodiments, oligonucleotides of a provided composition comprise more Sp chiral internucleotidic linkages than oligonucleotides of the reference composition. In some embodiments, oligonucleotides of a provided composition comprise more Sp phosphorothioate linkages than oligonucleotides of the reference composition. In some embodiments, oligonucleotides of a provided composition comprise more Sp phosphorothioate linkages than oligonucleotides of the reference composition at the 5′-end region. In some embodiments, oligonucleotides of a provided composition comprise more Sp phosphorothioate linkages than oligonucleotides of the reference composition at the 3′-end region. In some embodiments, oligonucleotides of a provided composition comprise more Sp phosphorothioate linkages in a wing region than oligonucleotides of the reference composition. In some embodiments, oligonucleotides of a provided composition comprise more Sp phosphorothioate linkages in each wing region than oligonucleotides of the reference composition. In some embodiments, oligonucleotides of a provided composition comprise more modified bases than oligonucleotides of the reference composition. In some embodiments, oligonucleotides of a provided composition comprise more methylated bases than oligonucleotides of the reference composition. In some embodiments, oligonucleotides of a provided composition comprise more methylated bases than oligonucleotides of the reference composition at the 5′-end region. In some embodiments, oligonucleotides of a provided composition comprise more methylated bases than oligonucleotides of the reference composition at the 3′-end region. In some embodiments, oligonucleotides of a provided composition comprise more methylated bases than in a wing region than oligonucleotides of the reference composition. In some embodiments, oligonucleotides of a provided composition comprise more methylated bases than in each wing region than oligonucleotides of the reference composition.

[1458] In some embodiments, oligonucleotides of a provided composition comprise fewer 2′-MOE modifications than oligonucleotides of the reference composition. In some embodiments, oligonucleotides of a provided composition comprise fewer 2′-MOE modifications than oligonucleotides of the reference composition. In some embodiments, oligonucleotides of a provided composition comprise fewer 2′-MOE modifications than oligonucleotides of the reference composition at the 5′-end region. In some embodiments, oligonucleotides of a provided composition comprise fewer 2′-MOE modifications than oligonucleotides of the reference composition at the 3′-end. In some embodiments, oligonucleotides of a provided composition comprise fewer 2′-MOE modifications than in a wing region than oligonucleotides of the reference composition. In some embodiments, oligonucleotides of a provided composition comprise fewer 2′-MOE modifications than in each wing region than oligonucleotides of the reference composition. In some embodiments, individual oligonucleotides within the reference plurality differ from one another in stereochemical structure. In some embodiments, at least some oligonucleotides within the reference plurality have a structure different from a structure represented by the plurality of oligonucleotides of the composition. In some embodiments, at least some oligonucleotides within the reference plurality do not comprise a wing region and a core region. In some embodiments, the reference composition is a substantially racemic preparation of oligonucleotides that share the base sequence. In some embodiments, the reference composition is a chirally controlled oligonucleotide composition of another oligonucleotide type. In some embodiments, oligonucleotides of the reference composition comprise more phosphorothioate linkages. In some embodiments, oligonucleotides of the reference composition comprise only phosphorothioate linkages. In some embodiments, oligonucleotides of the reference composition comprise fewer modified sugar moieties. In some embodiments, oligonucleotides of the reference composition comprise fewer modified sugar moieties, wherein the modification is 2′-OR¹. In some embodiments, oligonucleotides of the reference composition comprise more modified sugar moieties. In some embodiments, oligonucleotides of the reference composition comprise more modified sugar moieties, the modification is 2′-OR¹. In some embodiments, oligonucleotides of the reference composition comprise fewer phosphorothioate linkages. In some embodiments, oligonucleotides of the reference composition have a wing, and comprise fewer phosphorothioate linkages at the wing. In some embodiments, oligonucleotides of the reference composition comprise fewer Sp phosphorothioate linkages. In some embodiments, oligonucleotides of the reference composition have a wing, and comprise fewer Sp phosphorothioate linkages at the wing. In some embodiments, oligonucleotides of the reference composition comprise more Rp phosphorothioate linkages. In some embodiments, oligonucleotides of the reference composition have a wing, and comprise more Rp phosphorothioate linkages at the wing. In some embodiments, oligonucleotides of the reference composition comprise fewer methylated bases. In some embodiments, oligonucleotides of the reference composition comprise more 2′-MOE modifications. In some embodiments, oligonucleotides of the reference composition comprise fewer natural phosphate linkages. In some embodiments, oligonucleotides of the reference composition comprise fewer natural phosphate linkages at the 5′- and/or 3′-end. In some embodiments, oligonucleotides of the reference composition comprise fewer natural phosphate linkages in a region corresponding to a wing of oligonucleotides of the first plurality. In some embodiments, oligonucleotides of a provided composition comprise natural phosphate linkages in a wing, and oligonucleotides of the reference composition comprise fewer natural phosphate linkages at the corresponding wing region. In some embodiments, oligonucleotides of a provided composition comprises natural phosphate linkages in a wing, and oligonucleotides of the reference composition comprises modified internucleotidic linkages at one or more such natural phosphate linkage locations in a wing. In some embodiments, oligonucleotides of a provided composition comprise natural phosphate linkages in a wing, and oligonucleotides of the reference composition comprises phosphorothioate linkages at one or more such natural phosphate linkage locations in a wing. In some embodiments, oligonucleotides of the reference composition comprise no natural phosphate linkages. In some embodiments, oligonucleotides of the reference composition comprise no wing-core-wing structure. In some embodiments, oligonucleotides of a provided composition comprise a 5′-end wing region comprising a natural phosphate linkage between the two nucleosides at its 3′-end, and oligonucleotides of a reference plurality do not have a natural phosphate linkage at the same position. In some embodiments, oligonucleotides of a provided composition comprise a 3′-end wing region comprising a natural phosphate linkage between the two nucleosides at its 5′-end, and oligonucleotides of a reference plurality do not have a natural phosphate linkage at the same position.

[1459] In some embodiments, oligonucleotides of a provided composition contain more 2′-F modifications than oligonucleotides of a reference composition. In some embodiments, oligonucleotides of a provided composition contain more 2′-F modifications in a wing region. In some embodiments, oligonucleotides of a provided composition contain more 2′-F modifications in each wing region.

[1460] In some embodiments, provided chirally controlled oligonucleotide compositions comprises oligonucleotides of one oligonucleotide type. In some embodiments, provided chirally controlled oligonucleotide compositions comprises oligonucleotides of only one oligonucleotide type. In some embodiments, provided chirally controlled oligonucleotide compositions has oligonucleotides of only one oligonucleotide type. In some embodiments, provided chirally controlled oligonucleotide compositions comprises oligonucleotides of two or more oligonucleotide types. In some embodiments, using such compositions, provided methods can target more than one target. In some embodiments, a chirally controlled oligonucleotide composition comprising two or more oligonucleotide types targets two or more targets. In some embodiments, a chirally controlled oligonucleotide composition comprising two or more oligonucleotide types targets two or more mismatches. In some embodiments, a single oligonucleotide type targets two or more targets, e.g., mutations. In some embodiments, a target region of oligonucleotides of one oligonucleotide type comprises two or more “target sites” such as two mutations or SNPs.

[1461] In some embodiments, oligonucleotides in a provided chirally controlled oligonucleotide composition optionally comprise modified bases or sugars. In some embodiments, a provided chirally controlled oligonucleotide composition does not have any modified bases or sugars. In some embodiments, a provided chirally controlled oligonucleotide composition does not have any modified bases. In some embodiments, oligonucleotides in a provided chirally controlled oligonucleotide composition comprise modified bases and sugars. In some embodiments, oligonucleotides in a provided chirally controlled oligonucleotide composition comprise a modified base. In some embodiments, oligonucleotides in a provided chirally controlled oligonucleotide composition comprise a modified sugar. Modified bases and sugars for oligonucleotides are widely known in the art, including but not limited in those described in the present disclosure. In some embodiments, a modified base is 5-mC. In some embodiments, a modified sugar is a 2′-modified sugar. Suitable 2′-modification of oligonucleotide sugars are widely known by a person having ordinary skill in the art. In some embodiments, 2′-modifications include but are not limited to 2′-OR¹, wherein R¹ is not hydrogen. In some embodiments, a 2′-modification is 2′-OR¹, wherein R¹ is optionally substituted C₁₋₆ aliphatic. In some embodiments, a 2′-modification is 2′-MOE. In some embodiments, a modification is 2′-halogen. In some embodiments, a modification is 2′-F. In some embodiments, modified bases or sugars may further enhance activity, stability and/or selectivity of a chirally controlled oligonucleotide composition, whose common pattern of backbone chiral centers provides unexpected activity, stability and/or selectivity.

[1462] In some embodiments, a provided chirally controlled oligonucleotide composition does not have any modified sugars. In some embodiments, a provided chirally controlled oligonucleotide composition does not have any 2′-modified sugars. In some embodiments, the present disclosure surprising found that by using chirally controlled oligonucleotide compositions, modified sugars are not needed for stability, activity, and/or control of cleavage patterns. Furthermore, in some embodiments, the present disclosure surprisingly found that chirally controlled oligonucleotide compositions of oligonucleotides without modified sugars deliver better properties in terms of stability, activity, turn-over and/or control of cleavage patterns. For example, in some embodiments, it is surprising found that chirally controlled oligonucleotide compositions of oligonucleotides having no modified sugars dissociates much faster from cleavage products and provide significantly increased turn-over than compositions of oligonucleotides with modified sugars.

[1463] As discussed in detail herein, the present disclosure provides, among other things, a chirally controlled oligonucleotide composition, meaning that the composition contains a plurality of oligonucleotides of at least one type. Each oligonucleotide molecule of a particular “type” is comprised of preselected (e.g., predetermined) structural elements with respect to: (1) base sequence; (2) pattern of backbone linkages; (3) pattern of backbone chiral centers; and (4) pattern of backbone P-modification moieties. In some embodiments, provided oligonucloetide compositions contain oligonucleotides that are prepared in a single synthesis process. In some embodiments, provided compositions contain oligonucloetides having more than one chiral configuration within a single oligonucleotide molecule (e.g., where different residues along the oligonucleotide have different stereochemistry); in some such embodiments, such oligonucleotides may be obtained in a single synthesis process, without the need for secondary conjugation steps to generate individual oligonucleotide molecules with more than one chiral configuration.

[1464] Oligonucleotide compositions as provided herein can be used as agents for modulating a number of cellular processes and machineries, including but not limited to, transcription, translation, immune responses, epigenetics, etc. In addition, oligonucleotide compositions as provided herein can be used as reagents for research and/or diagnostic purposes. One of ordinary skill in the art will readily recognize that the present disclosure herein is not limited to particular use but is applicable to any situations where the use of synthetic oligonucleotides is desirable. Among other things, provided compositions are useful in a variety of therapeutic, diagnostic, agricultural, and/or research applications.

[1465] In some embodiments, provided oligonucleotide compositions comprise oligonucleotides and/or residues thereof that include one or more structural modifications as described in detail herein. In some embodiments, provided oligonucleotide compositions comprise oligonucleoties that contain one or more nucleic acid analogs. In some embodiments, provided oligonucleotide compositions comprise oligonucleotides that contain one or more artificial nucleic acids or residues, including but not limited to: peptide nucleic acids (PNA), Morpholino and locked nucleic acids (LNA), glycon nucleic acids (GNA), threose nucleic acids (TNA), Xeno nucleic acids (ZNA), and any combination thereof.

[1466] In any of the embodiments, the disclosure is useful for oligonucleotide-based modulation of gene expression, immune response, etc. Accordingly, stereo-defined, oligonucleotide compositions of the disclosure, which contain oligonucleotides of predetermined type (i.e., which are chirally controlled, and optionally chirally pure), can be used in lieu of conventional stereo-random or chirally impure counterparts. In some embodiments, provided compositions show enhanced intended effects and/or reduced unwanted side effects. Certain embodiments of biological and clinical/therapeutic applications of the disclosure are discussed explicitly below.

[1467] Various dosing regimens can be utilized to administer provided chirally controlled oligonucleotide compositions. In some embodiments, multiple unit doses are administered, separated by periods of time. In some embodiments, a given composition has a recommended dosing regimen, which may involve one or more doses. In some embodiments, a dosing regimen comprises a plurality of doses each of which are separated from one another by a time period of the same length; in some embodiments, a dosing regimen comprises a plurality of doses and at least two different time periods separating individual doses. In some embodiments, all doses within a dosing regimen are of the same unit dose amount. In some embodiments, different doses within a dosing regimen are of different amounts. In some embodiments, a dosing regimen comprises a first dose in a first dose amount, followed by one or more additional doses in a second dose amount different from the first dose amount. In some embodiments, a dosing regimen comprises a first dose in a first dose amount, followed by one or more additional doses in a second (or subsequent) dose amount that is same as or different from the first dose (or another prior dose) amount. In some embodiments, a dosing regimen comprises administering at least one unit dose for at least one day. In some embodiments, a dosing regimen comprises administering more than one dose over a time period of at least one day, and sometimes more than one day. In some embodiments, a dosing regimen comprises administering multiple doses over a time period of at least week. In some embodiments, the time period is at least 2, 3, 4, 5, 6, 7, 8, 9, 10, 11, 12, 13, 14, 15, 16, 17, 18, 19, 20, 21, 22, 23 24, 25, 26, 27, 28, 29, 30, 31, 32, 33, 34, 35, 36, 37, 38, 39, 40 or more (e.g., about 45, 50, 55, 60, 65, 70, 75, 80, 85, 90, 95, 100 or more) weeks. In some embodiments, a dosing regimen comprises administering one dose per week for more than one week. In some embodiments, a dosing regimen comprises administering one dose per week for 2, 3, 4, 5, 6, 7, 8, 9, 10, 11, 12, 13, 14, 15, 16, 17, 18, 19, 20, 21, 22, 23 24, 25, 26, 27, 28, 29, 30, 31, 32, 33, 34, 35, 36, 37, 38, 39, 40 or more (e.g., about 45, 50, 55, 60, 65, 70, 75, 80, 85, 90, 95, 100 or more) weeks. In some embodiments, a dosing regimen comprises administering one dose every two weeks for more than two week period. In some embodiments, a dosing regimen comprises administering one dose every two weeks over a time period of 2, 3, 4, 5, 6, 7, 8, 9, 10, 11, 12, 13, 14, 15, 16, 17, 18, 19, 20, 21, 22, 23 24, 25, 26, 27, 28, 29, 30, 31, 32, 33, 34, 35, 36, 37, 38, 39, 40 or more (e.g., about 45, 50, 55, 60, 65, 70, 75, 80, 85, 90, 95, 100 or more) weeks. In some embodiments, a dosing regimen comprises administering one dose per month for one month. In some embodiments, a dosing regimen comprises administering one dose per month for more than one month. In some embodiments, a dosing regimen comprises administering one dose per month for 2, 3, 4, 5, 6, 7, 8, 9, 10, 11, 12, or more months. In some embodiments, a dosing regimen comprises administering one dose per week for about 10 weeks. In some embodiments, a dosing regimen comprises administering one dose per week for about 20 weeks. In some embodiments, a dosing regimen comprises administering one dose per week for about 30 weeks. In some embodiments, a dosing regimen comprises administering one dose per week for 26 weeks. In some embodiments, a chirally controlled oligonucleotide composition is administered according to a dosing regimen that differs from that utilized for a chirally uncontrolled (e.g., stereorandom) oligonucleotide composition of the same sequence, and/or of a different chirally controlled oligonucleotide composition of the same sequence. In some embodiments, a chirally controlled oligonucleotide composition is administered according to a dosing regimen that is reduced as compared with that of a chirally uncontrolled (e.g., sterorandom) oligonucleotide composition of the same sequence in that it achieves a lower level of total exposure over a given unit of time, involves one or more lower unit doses, and/or includes a smaller number of doses over a given unit of time. In some embodiments, a chirally controlled oligonucleotide composition is administered according to a dosing regimen that extends for a longer period of time than does that of a chirally uncontrolled (e.g., stereorandom) oligonucleotide composition of the same sequence Without wishing to be limited by theory, Applicant notes that in some embodiments, the shorter dosing regimen, and/or longer time periods between doses, may be due to the improved stability, bioavailability, and/or efficacy of a chirally controlled oligonucleotide composition. In some embodiments, a chirally controlled oligonucleotide composition has a longer dosing regimen compared to the corresponding chirally uncontrolled oligonucleotide composition. In some embodiments, a chirally controlled oligonucleotide composition has a shorter time period between at least two doses compared to the corresponding chirally uncontrolled oligonucleotide composition. Without wishing to be limited by theory, Applicant notes that in some embodiments longer dosing regimen, and/or shorter time periods between doses, may be due to the improved safety of a chirally controlled oligonucleotide composition.

[1468] In some embodiments, with their low toxicity, provided oligonucleotides and compositions can be administered in higher dosage and/or with higher frequency. In some embodiments, with their improved delivery (and other properties), provided compositions can be administered in lower dosages and/or with lower frequency to achieve biological effects, for example, clinical efficacy.

[1469] A single dose can contain various amounts of oligonucleotides. In some embodiments, a single dose can contain various amounts of a type of chirally controlled oligonucleotide, as desired suitable by the application. In some embodiments, a single dose contains about 1, 5, 10, 20, 30, 40, 50, 60, 70, 80, 90, 100, 110, 120, 130, 140, 150, 160, 170, 180, 190, 200, 210, 220, 230, 240, 250, 260, 270, 280, 290, 300 or more (e.g., about 350, 400, 450, 500, 550, 600, 650, 700, 750, 800, 850, 900, 950, 1000 or more) mg of a type of chirally controlled oligonucleotide. In some embodiments, a single dose contains about 1 mg of a type of chirally controlled oligonucleotide. In some embodiments, a single dose contains about 5 mg of a type of chirally controlled oligonucleotide. In some embodiments, a single dose contains about 10 mg of a type of chirally controlled oligonucleotide. In some embodiments, a single dose contains about 15 mg of a type of chirally controlled oligonucleotide. In some embodiments, a single dose contains about 20 mg of a type of chirally controlled oligonucleotide. In some embodiments, a single dose contains about 50 mg of a type of chirally controlled oligonucleotide. In some embodiments, a single dose contains about 100 mg of a type of chirally controlled oligonucleotide. In some embodiments, a single dose contains about 150 mg of a type of chirally controlled oligonucleotide. In some embodiments, a single dose contains about 200 mg of a type of chirally controlled oligonucleotide. In some embodiments, a single dose contains about 250 mg of a type of chirally controlled oligonucleotide. In some embodiments, a single dose contains about 300 mg of a type of chirally controlled oligonucleotide. In some embodiments, a chirally controlled oligonucleotide is administered at a lower amount in a single dose, and/or in total dose, than a chirally uncontrolled oligonucleotide. In some embodiments, a chirally controlled oligonucleotide is administered at a lower amount in a single dose, and/or in total dose, than a chirally uncontrolled oligonucleotide due to improved efficacy. In some embodiments, a chirally controlled oligonucleotide is administered at a higher amount in a single dose, and/or in total dose, than a chirally uncontrolled oligonucleotide. In some embodiments, a chirally controlled oligonucleotide is administered at a higher amount in a single dose, and/or in total dose, than a chirally uncontrolled oligonucleotide due to improved safety.

[1470] A provided oligonucleotide composition as used herein may comprise single stranded and/or multiply stranded oligonucleotides. In some embodiments, single-stranded oligonucleotides contain self-complementary portions that may hybridize under relevant conditions so that, as used, even single-stranded oligonucleotides may have at least partially double-stranded character. In some embodiments, an oligonucleotide included in a provided composition is single-stranded, double-stranded, or triple-stranded. In some embodiments, an oligonucleotide included in a provided composition comprises a single-stranded portion and a multiple-stranded portion within the oligonucleotide. In some embodiments, as noted above, individual single-stranded oligonucleotides can have double-stranded regions and single-stranded regions.

[1471] In some embodiments, provided compositions include one or more oligonucleotides fully or partially complementary to strand of: structural genes, genes control and/or termination regions, and/or self-replicating systems such as viral or plasmid DNA. In some embodiments, provided compositions include one or more oligonucleotides that are or act as siRNAs or other RNA interference reagents (RNAi agents or iRNA agents), shRNA, antisense oligonucleotides, self-cleaving RNAs, ribozymes, fragment thereof and/or variants thereof (such as Peptidyl transferase 23S rRNA, RNase P, Group I and Group II introns, GIR1 branching ribozymes, Leadzyme, Hairpin ribozymes, Hammerhead ribozymes, HDV ribozymes, Mammalian CPEB3 ribozyme, VS ribozymes, glmS ribozymes, CoTC ribozyme, etc.), microRNAs, microRNA mimics, supermirs, aptamers, antimirs, antagomirs, Ul adaptors, triplex-forming oligonucleotides, RNA activators, long non-coding RNAs, short non-coding RNAs (e.g., piRNAs), immunomodulatory oligonucleotides (such as immunostimulatory oligonucleotides, immunoinhibitory oligonucleotides), GNA, LNA, ENA, PNA, TNA, morpholinos, G-quadruplex (RNA and DNA), antiviral oligonucleotides, and decoy oligonucleotides.

[1472] In some embodiments, provided compositions include one or more hybrid (e.g., chimeric) oligonucleotides. In the context of the present disclosure, the term “hybrid” broadly refers to mixed structural components of oligonucloetides. Hybrid oliogonucleotides may refer to, for example, (1) an oligonucleotide molecule having mixed classes of nucleotides, e.g., part DNA and part RNA within the single molecule (e.g., DNA-RNA); (2) complementary pairs of nucleic acids of different classes, such that DNA:RNA base pairing occurs either intramolecularly or intermolecularly; or both; (3) an oligonucleotide with two or more kinds of the backbone or internucleotide linkages.

[1473] In some embodiments, provided compositions include one or more oligonucleotide that comprises more than one classes of nucleic acid residues within a single molecule. For example, in any of the embodiments described herein, an oligonucleotide may comprise a DNA portion and an RNA portion. In some embodiments, an oligonucleotide may comprise a unmodified portion and modified portion.

[1474] Provided oligonucleotide compositions can include oligonucleotides containing any of a variety of modifications, for example as described herein. In some embodiments, particular modifications are selected, for example, in light of intended use. In some embodiments, it is desirable to modify one or both strands of a double-stranded oligonucleotide (or a double-stranded portion of a single-stranded oligonucleotide). In some embodiments, the two strands (or portions) include different modifications. In some embodiments, the two strands include the same modifications. One of skill in the art will appreciate that the degree and type of modifications enabled by methods of the present disclosure allow for numerous permutations of modifications to be made. Example such modifications are described herein and are not meant to be limiting.

[1475] The phrase “antisense strand” as used herein, refers to an oligonucleotide that is substantially or 100% complementary to a target sequence of interest. The phrase “antisense strand” includes the antisense region of both oligonucleotides that are formed from two separate strands, as well as unimolecular oligonucleotides that are capable of forming hairpin or dumbbell type structures. The terms “antisense strand” and “guide strand” are used interchangeably herein.

[1476] The phrase “sense strand” refers to an oligonucleotide that has the same nucleoside sequence, in whole or in part, as a target sequence such as a messenger RNA or a sequence of DNA. The terms “sense strand” and “passenger strand” are used interchangeably herein.

[1477] By “target sequence” is meant any nucleic acid sequence whose expression or activity is to be modulated. The target nucleic acid can be DNA or RNA, such as endogenous DNA or RNA, viral DNA or viral RNA, or other RNA encoded by a gene, virus, bacteria, fungus, mammal, or plant. In some embodiments, a target sequence is associated with a disease or disorder.

[1478] By “specifically hybridizable” and “complementary” is meant that a nucleic acid can form hydrogen bond(s) with another nucleic acid sequence by either traditional Watson-Crick or other non-traditional types. In reference to the nucleic molecules of the present disclosure, the binding free energy for a nucleic acid molecule with its complementary sequence is sufficient to allow the relevant function of the nucleic acid to proceed, e.g., RNAi activity. Determination of binding free energies for nucleic acid molecules is well known in the art (see, e.g., Turner et al, 1987, CSH Symp. Quant. Biol. LIT pp. 123-133; Freier et al., 1986, Proc. Nat. Acad. Sci. USA 83:9373-9377; Turner et al., 1987, J. Am. Chem. Soc. 109:3783-3785)

[1479] A percent complementarity indicates the percentage of contiguous residues in a nucleic acid molecule that can form hydrogen bonds (e.g., Watson-Crick base pairing) with a second nucleic acid sequence (e.g., 5, 6, 7, 8, 9,10 out of 10 being 50%, 60%, 70%, 80%, 90%, and 100% complementary). “Perfectly complementary” or 100% complementarity means that all the contiguous residues of a nucleic acid sequence will hydrogen bond with the same number of contiguous residues in a second nucleic acid sequence. Less than perfect complementarity refers to the situation in which some, but not all, nucleoside units of two strands can hydrogen bond with each other. “Substantial complementarity” refers to polynucleotide strands exhibiting 90% or greater complementarity, excluding regions of the polynucleotide strands, such as overhangs, that are selected so as to be noncomplementary. Specific binding requires a sufficient degree of complementarity to avoid non-specific binding of the oligomeric compound to non-target sequences under conditions in which specific binding is desired, e.g., under physiological conditions in the case of in vivo assays or therapeutic treatment, or in the case of in vitro assays, under conditions in which the assays are performed. In some embodiments, non-target sequences differ from corresponding target sequences by at least 5 nucleotides.

[1480] When used as therapeutics, a provided oligonucleotide is administered as a pharmaceutical composition. In some embodiments, the pharmaceutical composition comprises a therapeutically effective amount of a provided oligonucleotide comprising, or a pharmaceutically acceptable salt thereof, and at least one pharmaceutically acceptable inactive ingredient selected from pharmaceutically acceptable diluents, pharmaceutically acceptable excipients, and pharmaceutically acceptable carriers. In some embodiments, in provided compositions provided oligonucleotides may exist as salts, preferably pharmaceutically acceptable salts, e.g., sodium salts, ammonium salts, etc. In some embodiments, a salt of a provided oligonucleotide comprises two or more cations, for example, in some embodiments, up to the number of negatively charged acidic groups (e.g., phosphate, phosphorothioate, etc.) in an oligonucleotide. In another embodiment, the pharmaceutical composition is formulated for intravenous injection, oral administration, buccal administration, inhalation, nasal administration, topical administration, ophthalmic administration or otic administration. In further embodiments, the pharmaceutical composition is a tablet, a pill, a capsule, a liquid, an inhalant, a nasal spray solution, a suppository, a suspension, a gel, a colloid, a dispersion, a suspension, a solution, an emulsion, an ointment, a lotion, an eye drop or an ear drop.

### Pharmaceutical Compositions

[1481] When used as therapeutics, a provided oligonucleotide or oligonucleotide composition described herein is administered as a pharmaceutical composition. In some embodiments, the pharmaceutical composition comprises a therapeutically effective amount of a provided oligonucleotides, or a pharmaceutically acceptable salt thereof, and at least one pharmaceutically acceptable inactive ingredient selected from pharmaceutically acceptable diluents, pharmaceutically acceptable excipients, and pharmaceutically acceptable carriers. In some embodiments, the pharmaceutical composition is formulated for intravenous injection, oral administration, buccal administration, inhalation, nasal administration, topical administration, ophthalmic administration or otic administration. In some embodiments, the pharmaceutical composition is a tablet, a pill, a capsule, a liquid, an inhalant, a nasal spray solution, a suppository, a suspension, a gel, a colloid, a dispersion, a suspension, a solution, an emulsion, an ointment, a lotion, an eye drop or an ear drop.

[1482] In some embodiments, the present disclosure provides a pharmaceutical composition comprising chirally controlled oligonucleotide, or composition thereof, in admixture with a pharmaceutically acceptable excipient. One of skill in the art will recognize that the pharmaceutical compositions include the pharmaceutically acceptable salts of the chirally controlled oligonucleotide, or composition thereof, described above.

[1483] A variety of supramolecular nanocarriers can be used to deliver nucleic acids. Example nanocarriers include, but are not limited to liposomes, cationic polymer complexes and various polymeric. Complexation of nucleic acids with various polycations is another approach for intracellular delivery; this includes use of PEGlyated polycations, polyethyleneamine (PEI) complexes, cationic block co-polymers, and dendrimers. Several cationic nanocarriers, including PEI and polyamidoamine dendrimers help to release contents from endosomes. Other approaches include use of polymeric nanoparticles, polymer micelles, quantum dots and lipoplexes. In some embodiments, an oligonucleotide is conjugated to another molecular.

[1484] Additional nucleic acid delivery strategies are known in addition to the example delivery strategies described herein.

[1485] In therapeutic and/or diagnostic applications, the compounds of the disclosure can be formulated for a variety of modes of administration, including systemic and topical or localized administration. Techniques and formulations generally may be found in Remington, The Science and Practice of Pharmacy, (20th ed. 2000).

[1486] Provided oligonucleotides, and compositions thereof, are effective over a wide dosage range. For example, in the treatment of adult humans, dosages from about 0.01 to about 1000 mg, from about 0.5 to about 100 mg, from about 1 to about 50 mg per day, and from about 5 to about 100 mg per day are examples of dosages that may be used. The exact dosage will depend upon the route of administration, the form in which the compound is administered, the subject to be treated, the body weight of the subject to be treated, and the preference and experience of the attending physician.

[1487] Pharmaceutically acceptable salts are generally well known to those of ordinary skill in the art, and may include, by way of example but not limitation, acetate, benzenesulfonate, besylate, benzoate, bicarbonate, bitartrate, bromide, calcium edetate, carnsylate, carbonate, citrate, edetate, edisylate, estolate, esylate, fumarate, gluceptate, gluconate, glutamate, glycollylarsanilate, hexylresorcinate, hydrabamine, hydrobromide, hydrochloride, hydroxynaphthoate, iodide, isethionate, lactate, lactobionate, malate, maleate, mandelate, mesylate, mucate, napsylate, nitrate, pamoate (embonate), pantothenate, phosphate/diphosphate, polygalacturonate, salicylate, stearate, subacetate, succinate, sulfate, tannate, tartrate, or teoclate. Other pharmaceutically acceptable salts may be found in, for example, Remington, The Science and Practice of Pharmacy (20th ed. 2000). Preferred pharmaceutically acceptable salts include, for example, acetate, benzoate, bromide, carbonate, citrate, gluconate, hydrobromide, hydrochloride, maleate, mesylate, napsylate, pamoate (embonate), phosphate, salicylate, succinate, sulfate, or tartrate.

[1488] Depending on the specific conditions being treated, such agents may be formulated into liquid or solid dosage forms and administered systemically or locally. The agents may be delivered, for example, in a timed- or sustained-low release form as is known to those skilled in the art. Techniques for formulation and administration may be found in Remington, The Science and Practice of Pharmacy (20th ed. 2000). Suitable routes may include oral, buccal, by inhalation spray, sublingual, rectal, transdermal, vaginal, transmucosal, nasal or intestinal administration; parenteral delivery, including intramuscular, subcutaneous, intramedullary injections, as well as intrathecal, direct intraventricular, intravenous, intra-articullar, intra-sternal, intra-synovial, intra-hepatic, intralesional, intracranial, intraperitoneal, intranasal, or intraocular injections or other modes of delivery.

[1489] For injection, the agents of the disclosure may be formulated and diluted in aqueous solutions, such as in physiologically compatible buffers such as Hank's solution, Ringer's solution, or physiological saline buffer. For such transmucosal administration, penetrants appropriate to the barrier to be permeated are used in the formulation. Such penetrants are generally known in the art.

[1490] Use of pharmaceutically acceptable inert carriers to formulate the compounds herein disclosed for the practice of the disclosure into dosages suitable for systemic administration is within the scope of the disclosure. With proper choice of carrier and suitable manufacturing practice, the compositions of the present disclosure, in particular, those formulated as solutions, may be administered parenterally, such as by intravenous injection.

[1491] The compounds can be formulated readily using pharmaceutically acceptable carriers well known in the art into dosages suitable for oral administration. Such carriers enable the compounds of the disclosure to be formulated as tablets, pills, capsules, liquids, gels, syrups, slurries, suspensions and the like, for oral ingestion by a subject (e.g., patient) to be treated.

[1492] For nasal or inhalation delivery, the agents of the disclosure may also be formulated by methods known to those of skill in the art, and may include, for example, but not limited to, examples of solubilizing, diluting, or dispersing substances such as, saline, preservatives, such as benzyl alcohol, absorption promoters, and fluorocarbons.

[1493] In certain embodiments, oligonucleotides and compositions are delivered to the CNS. In certain embodiments, oligonucleotides and compositions are delivered to the cerebrospinal fluid. In certain embodiments, oligonucleotides and compositions are administered to the brain parenchyma. In certain embodiments, oligonucleotides and compositions are delivered to an animal/subject by intrathecal administration, or intracerebroventricular administration. Broad distribution of oligonucleotides and compositions, described herein, within the central nervous system may be achieved with intraparenchymal administration, intrathecal administration, or intracerebroventricular administration.

[1494] In certain embodiments, parenteral administration is by injection, by, e.g., a syringe, a pump, etc. In certain embodiments, the injection is a bolus injection. In certain embodiments, the injection is administered directly to a tissue, such as striatum, caudate, cortex, hippocampus and cerebellum.

[1495] In certain embodiments, methods of specifically localizing a pharmaceutical agent, such as by bolus injection, decreases median effective concentration (EC50) by a factor of 20, 25, 30, 35, 40, 45 or 50. In certain embodiments, the pharmaceutical agent in an antisense compound as further described herein. In certain embodiments, the targeted tissue is brain tissue. In certain embodiments the targeted tissue is striatal tissue. In certain embodiments, decreasing EC50 is desirable because it reduces the dose required to achieve a pharmacological result in a patient in need thereof.

[1496] In certain embodiments, an antisense oligonucleotide is delivered by injection or infusion once every month, every two months, every 90 days, every 3 months, every 6 months, twice a year or once a year.

[1497] Pharmaceutical compositions suitable for use in the present disclosure include compositions wherein the active ingredients are contained in an effective amount to achieve its intended purpose. Determination of the effective amounts is well within the capability of those skilled in the art, especially in light of the detailed disclosure provided herein.

[1498] In addition to the active ingredients, these pharmaceutical compositions may contain suitable pharmaceutically acceptable carriers comprising excipients and auxiliaries which facilitate processing of the active compounds into preparations which can be used pharmaceutically. The preparations formulated for oral administration may be in the form of tablets, dragees, capsules, or solutions.

[1499] Pharmaceutical preparations for oral use can be obtained by combining the active compounds with solid excipients, optionally grinding a resulting mixture, and processing the mixture of granules, after adding suitable auxiliaries, if desired, to obtain tablets or dragee cores. Suitable excipients are, in particular, fillers such as sugars, including lactose, sucrose, mannitol, or sorbitol; cellulose preparations, for example, maize starch, wheat starch, rice starch, potato starch, gelatin, gum tragacanth, methyl cellulose, hydroxypropylmethyl-cellulose, sodium carboxymethyl-cellulose (CMC), and/or polyvinylpyrrolidone (PVP: povidone). If desired, disintegrating agents may be added, such as the cross-linked polyvinylpyrrolidone, agar, or alginic acid or a salt thereof such as sodium alginate.

[1500] Dragee cores are provided with suitable coatings. For this purpose, concentrated sugar solutions may be used, which may optionally contain gum arabic, talc, polyvinylpyrrolidone, carbopol gel, polyethylene glycol (PEG), and/or titanium dioxide, lacquer solutions, and suitable organic solvents or solvent mixtures. Dye-stuffs or pigments may be added to the tablets or dragee coatings for identification or to characterize different combinations of active compound doses.

[1501] Pharmaceutical preparations that can be used orally include push-fit capsules made of gelatin, as well as soft, sealed capsules made of gelatin, and a plasticizer, such as glycerol or sorbitol. The push-fit capsules can contain the active ingredients in admixture with filler such as lactose, binders such as starches, and/or lubricants such as talc or magnesium stearate and, optionally, stabilizers. In soft capsules, the active compounds may be dissolved or suspended in suitable liquids, such as fatty oils, liquid paraffin, or liquid polyethylene glycols (PEGs). In addition, stabilizers may be added.

[1502] Depending upon the particular condition, or disease state, to be treated or prevented, additional therapeutic agents, which are normally administered to treat or prevent that condition, may be administered together with oligonucleotides of this disclosure. For example, chemotherapeutic agents or other anti-proliferative agents may be combined with the oligonucleotides of this disclosure to treat proliferative diseases and cancer. Examples of known chemotherapeutic agents include, but are not limited to, adriamycin, dexamethasone, vincristine, cyclophosphamide, fluorouracil, topotecan, taxol, interferons, and platinum derivatives.

[1503] The function and advantage of these and other embodiments of the present disclosure will be more fully understood from the examples described below. The following examples are intended to illustrate the benefits of the present disclosure, but do not exemplify the full scope of the disclosure.

### Targeting Components

[1504] In some embodiments, a provided composition further comprises a targeting component. A targeting component can be either conjugated or not conjugated to a lipid or a biologically active agent. In some embodiments, a targeting component is conjugated to a biologically active agent. In some embodiments, a biologically active agent is conjugated to both a lipid and a targeting component. As described in here, in some embodiments, a biologically active agent is a provided oligonucleotide. Thus, in some embodiments, a provided oligonucleotide composition further comprises, besides a lipid and oligonucleotides, a target elements. Various targeting components can be used in accordance with the present disclosure, e.g., lipids, antibodies, peptides, carbohydrates, etc. In some embodiments, provided oligonucleotides have the structure of A^{c}-[-L^{LD}-(R^{LD})ₐ]_{b}. In some embodiments, provided oligonucleotides have the structure of [(A^{c})ₐ-L^{LD}]_{b}-R^{LD}. In some embodiments, L^{LD}, R^{LD} combinations of L^{LD} and R^{LD}, or -[-L^{LD}-(R^{LD})ₐ]_{b} comprises one or more targeting components.

[1505] In some embodiments, a targeting component interacts with a protein on the surface of targeted cells. In some embodiments, such interaction facilitates internalization into targeted cells. In some embodiments, a targeting component comprises a sugar moiety. In some embodiments, a targeting component comprises a polypeptide moiety. In some embodiments, a targeting component comprises an antibody. In some embodiments, a targeting component is an antibody. In some embodiments, a targeting component comprises an inhibitor. In some embodiments, a targeting component is a moiety from a small molecule inhibitor. In some embodiments, an inhibitor is an inhibitor of a protein on the surface of targeted cells. In some embodiments, an inhibitor is a carbonic anhydrase inhibitor. In some embodiments, an inhibitor is a carbonic anhydrase inhibitor expressed on the surface of target cells. In some embodiments, a carbonic anhydrase is I, II, III, IV, V, VI, VII, VIII, IX, X, XI, XII, XIII, XIV, XV or XVI. In some embodiments, a carbonic anhydrase is membrane bound. In some embodiments, a carbonic anhydrase is IV, IX, XII or XIV. In some embodiments, an inhibitor is for IV, IX, XII and/or XIV. In some embodiments, an inhibitor is a carbonic anhydrase III inhibitor. In some embodiments, an inhibitor is a carbonic anhydrase IV inhibitor. In some embodiments, an inhibitor is a carbonic anhydrase IX inhibitor. In some embodiments, an inhibitor is a carbonic anhydrase XII inhibitor. In some embodiments, an inhibitor is a carbonic anhydrase XIV inhibitor. In some embodiments, an inhibitor comprises or is a sulfonamide (e.g., those described in Supuran, CT. Nature Rev Drug Discover 2008, 7, 168-181, which sulfonamides are incorporated herein by reference). In some embodiments, an inhibitor is a sulfonamide. In some embodiments, targeted cells are muscle cells.

[1506] In some embodiments, a targeting component is R^{LD} as defined and described in the present disclosure. In some embodiments, the present disclosure provides oligonucleotides comprising R^{LD}. In some embodiments, the present disclosure provides oligonucleotide compositions comprising oligonucleotides comprising R^{LD}. In some embodiments, the present disclosure provides oligonucleotide compositions comprising a first plurality of oligonucleotides comprising R^{LD}. In some embodiments, the present disclosure provides chirally controlled oligonucleotide compositions of oligonucleotides comprising R^{LD}. In some embodiments, R^{LD} comprises or is

[chemical structure]

In some embodiments, R^{LD} comprises or is

[chemical structure]

In some embodiments, R^{LD} comprises or is

[chemical structure]

In some embodiments, R^{LD} comprises or is

[chemical structure]

In some embodiments, R^{LD} comprises or is

[chemical structure]

In some embodiments, R^{LD} comprises or is

[chemical structure]

In some embodiments, R^{LD} comprises or is

[chemical structure]

In some embodiments, R^{LD} comprises or is

[chemical structure]

[1507] In some embodiments, R^{LD} comprises or is

[chemical structure]

In some embodiments, R^{LD} comprises or is

[chemical structure]

In some embodiments, R^{LD} comprises or is

[chemical structure]

In some embodiments, R^{LD} comprises or is

[chemical structure]

In some embodiments, R^{LD} comprises or is

[chemical structure]

In some embodiments, R^{LD} comprises or is

[chemical structure]

In some embodiments, R^{LD} comprises or is

[chemical structure]

In some embodiments, X is O. In some embodiments, X is S.

[1508] In some embodiments, the present disclosure provides technologies (e.g., reagents, methods, etc.) for conjugating various moieties to oligonucleotide chains. In some embodiments, the present disclosure provides technologies for conjugating targeting component to oligonucleotide chains. In some embodiments, the present disclosure provides acids comprising targeting components for conjugation, e.g., R^{LD}—COOH. In some embodiments, the present disclosure provides linkers for conjugation, e.g., L^{LD}. A person having ordinary skill in the art understands that many known and widely practiced technologies can be utilized for conjugation with oligonucleotide chains in accordance with the present disclosure. In some embodiments, a provided acid is

[chemical structure]

In some embodiments, a provided acid is

[chemical structure]

In some embodiments, a provided acid is

[chemical structure]

In some embodiments, a provided acid is

[chemical structure]

In some embodiments, the present disclosure provides methods and reagents for preparing such acids.

[1509] In some embodiments, provided compounds, e.g., reagents, products (e.g., oligonucleotides, amidites, etc.) etc. are at least 10%, 20%, 30%, 40%, 50%, 60%, 70%, 75%, 80%, 81%, 82%, 83%, 84%, 85%, 86%, 87%, 88%, 89%, 90%, 91%, 92%, 93%, 94%, 95%, 96%, 97%, 97% or 99% pure. In some embodiments, the purity is at least 50%. In some embodiments, the purity is at least 75%. In some embodiments, the purity is at least 80%. In some embodiments, the purity is at least 85%. In some embodiments, the purity is at least 90%. In some embodiments, the purity is at least 95%. In some embodiments, the purity is at least 96%. In some embodiments, the purity is at least 97%. In some embodiments, the purity is at least 98%. In some embodiments, the purity is at least 99%.

[1510] Target components can be incorporated into provided technologies through many types of methods in accordance with the present disclosure. In some embodiments, target components are physically mixed with provided oligonucleotides to form provided compositions. In some embodiments, target components are chemically conjugated with oligonucleotides. In some embodiments, target components are chemically conjugated with oligonucleotides through a linker, for example, L^{LD}.

[1511] In some embodiments, provided compositions comprise two or more target components. In some embodiments, provided oligonucleotides comprise two or more conjugated target components. In some embodiments, the two or more conjugated target components are the same. In some embodiments, the two or more conjugated target components are different. In some embodiments, provided oligonucleotides comprise no more than one target component. In some embodiments, oligonucleotides of a provided composition comprise different types of conjugated target components. In some embodiments, oligonucleotides of a provided composition comprise the same type of target components.

[1512] Target components can be conjugated to oligonucleotides optionally through linkers. Various types of linkers in the art can be utilized in accordance of the present disclosure. In some embodiments, a linker comprise a phosphate group, which can, for example, be used for conjugating target components through chemistry similar to those employed in oligonucleotide synthesis. In some embodiments, a linker comprises an amide, ester, or ether group. In some embodiments, a linker has the structure of -L-. Target components can be conjugated through either the same or different linkers compared to lipids.

[1513] Target components, optionally through linkers, can be conjugated to oligonucleotides at various suitable locations. In some embodiments, target components are conjugated through the 5′-OH group. In some embodiments, target components are conjugated through the 3′-OH group. In some embodiments, target components are conjugated through one or more sugar moieties. In some embodiments, target components are conjugated through one or more bases. In some embodiments, target components are incorporated through one or more internucleotidic linkages. In some embodiments, an oligonucleotide may contain multiple conjugated target components which are independently conjugated through its 5′-OH, 3′-OH, sugar moieties, base moieties and/or internucleotidic linkages. Target components and lipids can be conjugated either at the same, neighboring and/or separated locations. In some embodiments, a target component is conjugated at one end of an oligonucleotide, and a lipid is conjugated at the other end.

### Example Uses

[1514] In some embodiments, the present disclosure encompasses the use of a composition comprising a lipid and a biologically active agent. In some embodiments, the present disclosure provides methods for delivering a biologically active agent to a target location comprising administering a provided composition. In some embodiments, a provided method delivers a biologically active agent into a cell. In some embodiments, a provided method delivers a biologically active agent into a muscle cell. In some embodiments, a provided method delivers a biologically active agent into a cell within a tissue. In some embodiments, a provided method delivers a biologically active agent into a cell within an organ. In some embodiments, a provided method delivers a biologically active agent into a cell within a subject, comprising administering to the subject a provided composition. In some embodiments, a provided method delivers a biologically active agent into cytoplasm. In some embodiments, a provided method delivers a biologically active agent into nucleus.

[1515] In some embodiments, the present disclosure pertains to methods related to the delivery of a biologically active agent to a muscle cell or tissue, or a muscle cell or tissue in a mammal (e.g., a human subject), which method pertains to a use of a composition comprising a biological agent and a lipid.

### Biologically Active Agent: A Nucleic Acid

[1516] In some embodiments, the present disclosure pertains to compositions and methods related to a composition comprising a biologically active agent and a lipid comprising a C₁₀-C₄₀ linear, saturated or partially unsaturated, aliphatic chain. In some embodiments, the present disclosure pertains to compositions and methods related to a composition comprising a biologically active agent and a lipid comprising a C₁₀-C₄₀ linear, saturated or partially unsaturated, aliphatic chain, optionally substituted with one or more C₁₋₄ aliphatic group. In some embodiments, the present disclosure pertains to compositions and methods related to delivery of biologically active agents, wherein the compositions comprise a biologically active agent a lipid. In various embodiments, the lipid is selected from: lauric acid, myristic acid, palmitic acid, stearic acid, oleic acid, linoleic acid, alpha-linolenic acid, gamma-linolenic acid, docosahexaenoic acid (DHA or cis-DHA), turbinaric acid and dilinoleyl.

[1517] In some embodiments, a biologically active agent is a nucleic acid.

[1518] In some embodiments, a nucleic acid is an oligonucleotide, an antisense oligonucleotide, an RNAi agent, a miRNA, splice switching oligonucleotide (SSO), immunomodulatory nucleic acid, an aptamer, a ribozyme, a Piwi-interacting RNA (piRNA), a small nucleolar RNA (snoRNA), a mRNA, a lncRNA, a ncRNA, an antigomir (e.g., an antagonist to a miRNA, lncRNA, ncRNA or other nucleic acid), a plasmid, a vector, or a portion thereof.

[1519] In some embodiments, a nucleic acid is an oligonucleotide.

[1520] In some embodiments, the present disclosure pertains to: an oligonucleotide composition comprising a plurality of oligonucleotides, which share: 1) a common base sequence; 2) a common pattern of backbone linkages; and 3) a common pattern of backbone phosphorus modifications; wherein one or more oligonucleotides of the plurality are individually conjugated to a lipid. In some embodiments, the present disclosure pertains to: a chirally controlled oligonucleotide composition comprising a plurality of oligonucleotides, which share: 1) a common base sequence; 2) a common pattern of backbone linkages; and 3) a common pattern of backbone phosphorus modifications; wherein: the composition is chirally controlled in that the plurality of oligonucleotides share the same stereochemistry at one or more chiral internucleotidic linkages; one or more oligonucleotides of the plurality are individually conjugated to a lipid; and one or more oligonucleotides of the plurality are optionally and individually conjugated to a targeting compound or moiety. In some embodiments, the oligonucleotide is a splice-switching oligonucleotide. In some embodiments, the biologically active agent is an oligonucleotide capable of skipping or mediating skipping of an exon in a gene related to a muscle-related disease or disorder. In some embodiments, the biologically active agent is an oligonucleotide capable of skipping or mediating skipping of an exon in the dystrophin gene. In some embodiments, a common base sequence hybridizes with a transcript of dystrophin, myostatin, Huntingtin, a myostatin receptor, ActRIIB, ActRIIA, DMPK, Malat1, SMN2, dystrophia myotonica protein kinase (DMPK), Proprotein convertase subtilisin/kexin type 9 (PCSK9), SMAD7 or KRT14 (Keratin 14). In some embodiments, the sequence of the oligonucleotide comprises or consists of the sequence of any splice-switching oligonucleotide disclosed herein (e.g., in Table 4A).

[1521] In some embodiments, the plurality of oligonucleotides share the same stereochemistry at five or more chiral internucleotidic linkages. In some embodiments, the plurality of oligonucleotides share the same stereochemistry at ten or more chiral internucleotidic linkages. In some embodiments, the plurality of oligonucleotides share the same stereochemistry at each of the chiral internucleotidic linkages so that they share a common pattern of backbone chiral centers. In some embodiments, one or more oligonucleotides of the plurality are independently conjugated to a lipid through a 5′-OH on the oligonucleotide. In some embodiments, one or more oligonucleotides of the plurality are independently conjugated to a lipid through a 3′-OH on the oligonucleotide. In some embodiments, each oligonucleotide of the plurality is individually conjugated to a lipid. In some embodiments, each oligonucleotide of the plurality is individually conjugated to the same lipid. In some embodiments, the present disclosure pertains to: a composition comprising a biologically active agent and a lipid, wherein the agent is any agent disclosed herein, and wherein the lipid is any lipid disclosed herein. In some embodiments, each oligonucleotide of the plurality is individually conjugated to the same lipid at the same location. In some embodiments, a lipid is conjugated to an oligonucleotide through a linker. In some embodiments, one or more oligonucleotides of the plurality are independently conjugated to a targeting compound or moiety. In some embodiments, one or more oligonucleotides of the plurality are independently conjugated to a lipid and a targeting compound or moiety. In some embodiments, one or more oligonucleotides of the plurality are independently conjugated to a lipid at one end and a targeting compound or moiety at the other. In some embodiments, oligonucleotides of the plurality share the same chemical modification patterns. In some embodiments, oligonucleotides of the plurality share the same chemical modification patterns comprising one or more base modifications. In some embodiments, oligonucleotides of the plurality share the same chemical modification patterns comprising one or more sugar modifications. In some embodiments, the sequence of the oligonucleotide(s) comprises or consists of the sequence of any splice-switching oligonucleotide disclosed herein (e.g., in Table 4A).

[1522] In some embodiments, the plurality of oligonucleotides share a common pattern of sugar modification, which comprises 3 or more 2′-F. In some embodiments, the plurality of oligonucleotides share a common pattern of sugar modification, which comprises 3 or more consecutive 2′-F. In some embodiments, the plurality of oligonucleotides share a common pattern of sugar modification, which comprises 3 or more consecutive 2′-F within the 10 nucleotide at the 5′-end. In some embodiments, the plurality of oligonucleotides share a common pattern of sugar modification, which comprises 3 or more 2′-F within the 10 nucleotide at the 5′-end. In some embodiments, the plurality of oligonucleotides share a common pattern of sugar modification, which comprises 3 or more consecutive 2′-F at the 5′-end. In some embodiments, the plurality of oligonucleotides share a common pattern of sugar modification, which comprises 5 or more consecutive 2′-F within the first 10 nucleotide at the 3′-end. In some embodiments, the plurality of oligonucleotides share a common pattern of sugar modification, which comprises 5 or more 2′-F within the 10 nucleotide at the 3′-end. In some embodiments, the plurality of oligonucleotides share a common pattern of sugar modification, which comprises 7 or more consecutive 2′-F at the 3′-end. In some embodiments, the plurality of oligonucleotides share a common pattern of sugar modification, which comprises 3 or more consecutive 2′-F at the 5′-end, 3 or more consecutive 2′-F at the 3′-end, and 3 or more 2′-OR between the 5′-end 2′-F and the 3′-end 2′-F modifications. In some embodiments, the plurality of oligonucleotides share a common pattern of sugar modification, which comprises 3 or more 2′-F at the 5′-end, 3 or more 2′-F at the 3′-end, and 3 or more 2′-OR between the 5′-end 2′-F and the 3′-end 2′-F modifications. In some embodiments, the plurality of oligonucleotides share a common pattern of sugar modification, which comprises 5 or more 2′-F within the 10 nucleotides at the 5′-end. In some embodiments, the plurality of oligonucleotides share a common pattern of sugar modification, which comprises 3 or more consecutive 2′-F at the 5′-end. In some embodiments, the plurality of oligonucleotides share a common pattern of sugar modification, which comprises 7 or more 2′-F within the 10 nucleotides at the 3′-end. In some embodiments, the plurality of oligonucleotides share a common pattern of sugar modification, which comprises 5 or more consecutive 2′-F within the 10 nucleotides at the 3′-end. In some embodiments, the plurality of oligonucleotides share a common pattern of sugar modification, which comprises 7 or more consecutive 2′-F at the 3′-end. In some embodiments, the plurality of oligonucleotides comprises a 5′-wing-core-wing-3′ structure, wherein each wing region independently comprises 3 to 10 nucleosides, and the core region independently comprises 3 to 10 nucleosides. In some embodiments, the sequence of the oligonucleotide(s) comprises or consists of the sequence of any oligonucleotide disclosed herein (e.g., in Table 4A).

[1523] In some embodiments, the present disclosure pertains to: a method of delivering an oligonucleotide to a muscle cell or tissue in a human subject, comprising: (a) Providing a composition of any one of the preceding claims; and (b) Administering the composition to the human subject such that the oligonucleotide is delivered to a muscle cell or tissue in the subject. In some embodiments, the sequence of the oligonucleotide(s) comprises or consists of the sequence of any oligonucleotide disclosed herein (e.g., in Table 4A).

[1524] In some embodiments, the common base sequence is capable of hybridizing with a transcript in a muscle cell, which transcript contains a mutation that is linked to a muscle disease, or whose level, activity and/or distribution is linked to a muscle disease. In some embodiments, the common base sequence is capable of hybridizing with a transcript in a muscle cell, and the composition is characterized in that when it is contacted with the transcript in a transcript splicing system, splicing of the transcript is altered relative to that observed under reference conditions selected from the group consisting of absence of the composition, presence of a reference composition, and combinations thereof. In some embodiments, the common base sequence is capable of hybridizing with a transcript in a cell. In some embodiments, a common base sequence hybridizes with a transcript of dystrophin, myostatin, Huntingtin, a myostatin receptor, ActRIIB, ActRIIA, DMPK, Malat1, SMN2, dystrophia myotonica protein kinase (DMPK), Proprotein convertase subtilisin/kexin type 9 (PCSK9), SMAD7 or KRT14 (Keratin 14). In some embodiments, the common base sequence hybridizes with a transcript of dystrophin. In some embodiments, the common base sequence hybridizes with a transcript of dystrophin, and the composition increases the production of one or more functional or partially functional proteins encoded by dystrophin. In some embodiments, the sequence of the oligonucleotide(s) comprises or consists of the sequence of any oligonucleotide disclosed herein (e.g., in Table 4A).

[1525] In some embodiments, the oligonucleotide or oligonucleotides is or are splice switching oligonucleotide or oligonucleotides. In some embodiments, the sequence of the oligonucleotide(s) comprises or consists of the sequence of any oligonucleotide disclosed herein (e.g., in Table 4A).

[1526] In some embodiments, the present disclosure pertains to:

[1527] A method for inhibiting expression of a gene in a muscle cell or tissue in a mammal comprising preparing a composition comprising a lipid and an oligonucleotide (as a non-limiting example, a SSO) and administering the composition to the mammal.

[1528] A method of treating a disease that is caused by the over-expression of one or several proteins in a muscle cell or tissue in a subject, said method comprising the administration of a composition comprising a lipid and an oligonucleotide (as a non-limiting example, a SSO).

[1529] A method of treating a disease that is caused by a reduced, suppressed or missing expression of one or several proteins in a subject, said method comprising the administration of a composition comprising a lipid and an oligonucleotide (as a non-limiting example, a SSO).

[1530] A method for treating a sign and/or symptom of a disease, disorder, or condition related to a muscle-related disorder or disease in a subject by providing a composition comprising a lipid and an oligonucleotide (as a non-limiting example, a SSO) and administering a therapeutically effective amount of the composition to the subject.

[1531] A method of administering a biologically active agent to a subject in need thereof, comprising steps of providing a composition comprising a biologically active agent and a lipid, and administering the composition to the subject, wherein the biologically active compound is an oligonucleotide (as a non-limiting example, a SSO), and wherein the lipid is any lipid disclosed herein.

[1532] A method of treating a disease in a subject, the method comprising steps of providing a composition comprising a biologically active agent and a lipid, and administering a therapeutically effective amount of the composition to the subject, wherein the biologically active compound is an oligonucleotide (as a non-limiting example, a SSO), and wherein the lipid is any lipid disclosed herein, and wherein the disease is any disease disclosed herein.

[1533] A method for inhibiting expression of a gene in a muscle cell or tissue in a mammal, wherein the gene is related to a muscle-related disease or disorder, the method comprising steps of preparing a composition comprising a lipid and an oligonucleotide (as a non-limiting example, a SSO) and administering the composition to the mammal.

[1534] A method of treating a disease that is caused by the over-expression of one or several proteins in a muscle cell or tissue in a subject, said method comprising the administration of a composition comprising a lipid and an oligonucleotide (as a non-limiting example, a SSO).

[1535] A method of treating a disease that is caused by a reduced, suppressed or missing expression of one or several proteins in a muscle in a subject, said method comprising the administration of a composition comprising a lipid and an oligonucleotide (as a non-limiting example, a SSO).

[1536] A method for treating a sign and/or symptom of a disease, disorder, or condition related to a muscle-related disorder or disease in a subject by providing a composition comprising a lipid and an oligonucleotide (as a non-limiting example, a SSO) and administering a therapeutically effective amount of the composition to the subject.

[1537] A method of administering a biologically active agent to a subject in need thereof, comprising steps of providing a composition comprising a biologically active agent and a lipid, and administering the composition to the subject, wherein the biologically active compound is an oligonucleotide (as a non-limiting example, a SSO), and wherein the lipid is any lipid disclosed herein.

[1538] A method of treating a muscle-related disease or disorder in a subject, the method comprising steps of providing a composition comprising a biologically active agent and a lipid, and administering a therapeutically effective amount of the composition to the subject, wherein the biologically active compound is an oligonucleotide (as a non-limiting example, a SSO), and wherein the lipid is any lipid disclosed herein.

[1539] A method for skipping an exon in a gene in a muscle cell or tissue in a mammal, the method comprising steps of preparing a composition comprising a lipid and a splice-switching oligonucleotide and administering the composition to the mammal.

[1540] A method of treating a disease related to an exon comprising a mutation in a gene, said method comprising the administration of a composition comprising a lipid and a splice-switching oligonucleotide, wherein the splice-switching oligonucleotide is capable of skipping or mediating skipping the exon comprising the mutation. In some embodiments, the disease is a muscle-related disease.

[1541] A method of treating a disease that is caused by a mutation in an exon in a gene, said method comprising the administration of a composition comprising a lipid and an oligonucleotide, wherein the oligonucleotide is capable of skipping or mediating skipping the exon comprising the mutation. In some embodiments, the disease is a muscle-related disease.

[1542] A method for treating a sign and/or symptom of a disease, disorder, or condition related to a muscle-related disorder or disease in a subject by providing a composition comprising a lipid and an oligonucleotide (as a non-limiting example, a SSO) and administering a therapeutically effective amount of the composition to the subject.

[1543] A method of administering a biologically active agent to a subject in need thereof, comprising steps of providing a composition comprising a biologically active agent and a lipid, and administering the composition to the subject, wherein the oligonucleotide is capable of skipping or mediating skipping an exon comprising a mutation, and wherein the lipid is any lipid disclosed herein.

[1544] A method of treating a muscle-related disease or disorder in a subject, wherein the disease or disorder is related to an exon comprising a mutation in a gene, the method comprising steps of providing a composition comprising an oligonucleotide and a lipid, and administering a therapeutically effective amount of the composition to the subject, wherein the oligonucleotide is capable of skipping or mediating skipping the exon comprising the mutation, and wherein the lipid is any lipid disclosed herein.

[1545] A method for skipping an exon in the dystrophin gene in a muscle cell or tissue in a mammal, the method comprising steps of preparing a composition comprising a lipid and a splice-switching oligonucleotide and administering the composition to the mammal.

[1546] A method of treating a disease related to an exon comprising a mutation in the dystrophin gene, said method comprising the administration of a composition comprising a lipid and a splice-switching oligonucleotide, wherein the splice-switching oligonucleotide is capable of skipping or mediating skipping the exon comprising the mutation.

[1547] A method of treating a disease that is caused by a mutation in an exon in the dystrophin gene, said method comprising the administration of a composition comprising a lipid and an oligonucleotide, wherein the oligonucleotide is capable of skipping or mediating skipping the exon comprising the mutation.

[1548] A method for treating a sign and/or symptom of a disease, disorder, or condition related to a muscle-related disorder or disease in a subject by providing a composition comprising a lipid and an oligonucleotide (as a non-limiting example, a SSO) and administering a therapeutically effective amount of the composition to the subject.

[1549] A method of administering a biologically active agent to a subject in need thereof, comprising steps of providing a composition comprising a biologically active agent and a lipid, and administering the composition to the subject, wherein the oligonucleotide is capable of skipping or mediating skipping the exon comprising the mutation, and wherein the lipid is any lipid disclosed herein.

[1550] A method of treating Duchenne muscular dystrophy in a subject, wherein the Duchenne muscular dystrophy is related to a mutation in an exon in the dystrophin gene, the method comprising steps of providing a composition comprising an oligonucleotide and a lipid, and administering a therapeutically effective amount of the composition to the subject, wherein the oligonucleotide is capable of skipping or mediating skipping the exon comprising the mutation, and wherein the lipid is any lipid disclosed herein.

[1551] A method for skipping an exon in the dystrophin gene in a muscle cell or tissue in a mammal, the method comprising steps of preparing a composition comprising a lipid and a splice-switching oligonucleotide and administering the composition to the mammal, wherein the lipid is any lipid disclosed herein, and wherein the sequence of the splice-switching oligonucleotide comprises or consists of the sequence of any splice-switching oligonucleotide disclosed herein (e.g., in Table 4A).

[1552] A method of treating a disease related to an exon comprising a mutation in the dystrophin gene, said method comprising the administration of a composition comprising a lipid and a splice-switching oligonucleotide, wherein the splice-switching oligonucleotide is capable of skipping or mediating skipping the exon comprising the mutation, wherein the lipid is any lipid disclosed herein, and wherein the sequence of the splice-switching oligonucleotide comprises or consists of the sequence of any splice-switching oligonucleotide disclosed herein (e.g., in Table 4A).

[1553] A method of treating a disease that is caused by a mutation in an exon in the dystrophin gene, said method comprising the administration of a composition comprising a lipid and an oligonucleotide, wherein the oligonucleotide is capable of skipping or mediating skipping the exon comprising the mutation, wherein the lipid is any lipid disclosed herein, and wherein the oligonucleotide comprises or consists of the sequence of any splice-switching oligonucleotide disclosed herein (e.g., in Table 4A).

[1554] A method for treating a sign and/or symptom of a disease, disorder, or condition related to a muscle-related disorder or disease in a subject by providing a composition comprising a lipid and an oligonucleotide (as a non-limiting example, a SSO) and administering a therapeutically effective amount of the composition to the subject, wherein the lipid is any lipid disclosed herein, and wherein the sequence of the oligonucleotide comprises or consists of the sequence of any splice-switching oligonucleotide disclosed herein (e.g., in Table 4A).

[1555] A method of administering a biologically active agent to a subject in need thereof, comprising steps of providing a composition comprising a biologically active agent and a lipid, and administering the composition to the subject, wherein the oligonucleotide is capable of skipping or mediating skipping the exon comprising the mutation, and wherein the lipid is any lipid disclosed herein, wherein the lipid is any lipid disclosed herein, and wherein the sequence of the oligonucleotide comprises or consists of the sequence of any splice-switching oligonucleotide disclosed herein (e.g., in Table 4A).

[1556] A method of treating Duchenne muscular dystrophy in a subject, wherein the Duchenne muscular dystrophy is related to a mutation in an exon in the dystrophin gene, the method comprising steps of providing a composition comprising an oligonucleotide and a lipid, and administering a therapeutically effective amount of the composition to the subject, wherein the oligonucleotide is capable of skipping or mediating skipping the exon comprising the mutation, and wherein the lipid is any lipid disclosed herein, and wherein the oligonucleotide comprises or consists of the sequence of any splice-switching oligonucleotide disclosed herein (e.g., in Table 4A).

[1557] In some individuals with muscular dystrophy, an exon in the dystrophin gene comprises a mutation; in many cases, this mutation causes a frameshift, which can lead to a premature stop codon. This prematurely terminated dystrophin is not full-length and thus cannot perform all the necessary functions of this protein. In some treatments for muscular dystrophy, an oligonucleotide (e.g., a splice-switching oligonucleotide) is capable of skipping or causing the skipping of one or more exons comprising a mutation; this allows the expression of a shortened dystrophin gene product, which lacks the portion corresponding to the skipped exon(s), but is otherwise functional. A non-limiting example of muscular dystrophy is Duchenne muscular dystrophy (DMD). A non-limiting example of an exon comprising a mutation causing a frameshift mutation and a premature stop is exon 51 of the dystrophin gene.

[1558] In some embodiments, a biologically active agent comprises or consists of or is an oligonucleotide or oligonucleotide composition or chirally controlled oligonucleotide composition, wherein the sequence of the oligonucleotide comprises or consists of the sequence of an oligonucleotide capable of skipping or mediating skipping of exon 51, 45, 53 or 44 in the dystrophin gene.

[1559] Various oligonucleotides are listed in Table 4A. Many of these are capable of skipping or mediating skipping of exon 51 of the human dystrophin gene, as shown in data presented in U.S. Pat. Application No. 62/239,839, filed Oct. 9, 2015, which is incorporated by reference in its entirety; and in data shown here.

[1560] Various oligonucleotides particularly capable of mediating skipping of exon 51 of human dystrophin include: WV-887, WV-896, WV-1709, WV-1710, WV-1714, WV-2095, WV-2100, WV-2106, WV-2107, WV-2108, WV-2109, WV-2223, WV-2224, WV-2225, WV-2226, WV-2227, WV-2228, WV-2229, WV-2230, WV-2438, WV-2444, WV-2445, WV-2526, WV-2527, WV-2528, WV-2529, WV-2530, WV-2533, among others. Thus, any composition or method described herein can comprise a biologically active agent, wherein the biologically active agent is selected from: WV-887, WV-896, WV-1709, WV-1710, WV-1714, WV-2095, WV-2100, WV-2106, WV-2107, WV-2108, WV-2109, WV-2223, WV-2224, WV-2225, WV-2226, WV-2227, WV-2228, WV-2229, WV-2230, WV-2438, WV-2444, WV-2445, WV-2526, WV-2527, WV-2528, WV-2529, WV-2530, WV-2533, or any other nucleic acid disclosed herein (including, but not limited to, those listed in Table 4A).

[1561] In some embodiments, a provided oligonucleotide is selected from those presented in the tables in the present disclosure, wherein the oligonucleotide is conjugated to a lipid and optionally a target component.

TABLE 4A
Example Oligonucleotides.

| WAVE ID | Base Sequence | SEQ ID NO: | Description | SEQ ID NO: | Stereochemistry¹ | Notes | Target/Program |
|---|---|---|---|---|---|---|---|
| ONT- | UCAAGGAAGA | 205 | mU*SmC*SmA*SmA*SmG*SmG*SmA | 957 | SSSSSSSSSSSSSS | Chiral version of | DMD |
| 395 | UGGCAUUUCU | | *SmA*SmG*SmA*SmU*SmG*SmG*Sm | | SSSSS | PRO051 (Drisapersen) | |
| | | | C*SmA*SmU*SmU*SmU*SmC*SmU | | | | |
| WV-942 | UCAAGGAAGA | 206 | mU*mC*mA*mA*mG*mG*mA*mA*m | 958 | XXXXXXXXXX | PRO051 (Drisapersen) | DMD |
| | UGGCAUUUCU | | G*mA*mU*mG*mG*mC*mA*mU*mU* | | XXXXXXXXX | | |
| | | | mU*mC*mU | | | | |
| WV-943 | GGCCAAACCUC | 207 | mG*mG*mC*mC*mA*mA*mA*mC*m | 959 | XXXXXXXXXX | Exon 23 control | DMD |
| | GGCUUACCU | | C*mU*mC*mG*mG*mC*mU*mU*mA* | | XXXXXXXXX | | |
| | | | mC*mC*mU | | | | |
| WV- | CUCCAACAUCA | 208 | mC*mU*mC*mC*mA*mA*mC*mA*m | 960 | XXXXXXXXXX | eteplirsen-all-2′-Me | DMD |
| 2165 | AGGAAGAUGG | | U*mC*mA*mA*mG*mG*mA*mA*mG* | | XXXXXXXXXX | 30mer | |
| | CAUUUCUAG | | mA*mU*mG*mG*mC*mA*mU*mU*m | | XXXXXXXXX | | |
| | | | U*mC*mU*mA*mG | | | | |
| WV- | ACCAGAGUAA | 209 | mA*mC*mC*mA*mG*mA*mG*mU*m | 961 | XXXXXXXXXX | 25-mer 2′-OMethyl | DMD |
| 2179 | CAGUCUGAGU | | A*mA*mC*mA*mG*mU*mC*mU*mG* | | XXXXXXXXXX | | |
| | AGGAG | | mA*mG*mU*mA*mG*mG*mA*mG | | XXXX | | |
| WV- | CACCAGAGUA | 210 | mC*mA*mC*mC*mA*mG*mA*mG*m | 962 | XXXXXXXXXX | 25-mer 2′-OMethyl | DMD |
| 2180 | ACAGUCUGAG | | U*mA*mA*mC*mA*mG*mU*mC*mU* | | XXXXXXXXXX | | |
| | UAGGA | | mG*mA*mG*mU*mA*mG*mG*mA | | XXXX | | |
| WV- | UCACCAGAGU | 211 | mU*mC*mA*mC*mC*mA*mG*mA*m | 963 | XXXXXXXXXX | 25-mer 2′-OMethyl | DMD |
| 2181 | AACAGUCUGA | | G*mU*mA*mA*mC*mA*mG*mU*mC* | | XXXXXXXXXX | | |
| | GUAGG | | mU*mG*mA*mG*mU*mA*mG*mG | | XXXX | | |
| WV- | GUCACCAGAG | 212 | mG*mU*mC*mA*mC*mC*mA*mG*m | 964 | XXXXXXXXXX | 25-mer 2′-OMethyl | DMD |
| 2182 | UAACAGUCUG | | A*mG*mU*mA*mA*mC*mA*mG*mU* | | XXXXXXXXXX | | |
| | AGUAG | | mC*mU*mG*mA*mG*mU*mA*mG | | XXXX | | |
| WV- | GUUGUGUCAC | 213 | mG*mU*mU*mG*mU*mG*mU*mC*m | 965 | XXXXXXXXXX | 25-mer 2′-OMethyl | DMD |
| 2183 | CAGAGUAACA | | A*mC*mC*mA*mG*mA*mG*mU*mA* | | XXXXXXXXXX | | |
| | GUCUG | | mA*mC*mA*mG*mU*mC*mU*mG | | XXXX | | |
| WV- | GGUUGUGUCA | 214 | mG*mG*mU*mU*mG*mU*mG*mU*m | 966 | XXXXXXXXXX | 25-mer 2′-OMethyl | DMD |
| 2184 | CCAGAGUAAC | | C*mA*mC*mC*mA*mG*mA*mG*mU* | | XXXXXXXXXX | | |
| | AGUCU | | mA*mA*mC*mA*mG*mU*mC*mU | | XXXX | | |
| WV- | AGGUUGUGUC | 215 | mA*mG*mG*mU*mU*mG*mU*mG*m | 967 | XXXXXXXXXX | 25-mer 2′-OMethyl | DMD |
| 2185 | ACCAGAGUAA | | U*mC*mA*mC*mC*mA*mG*mA*mG* | | XXXXXXXXXX | | |
| | CAGUC | | mU*mA*mA*mC*mA*mG*mU*mC | | XXXX | | |
| WV- | CAGGUUGUGU | 216 | mC*mA*mG*mG*mU*mU*mG*mU*m | 968 | XXXXXXXXXX | 25-mer 2′-OMethyl | DMD |
| 2186 | CACCAGAGUA | | G*mU*mC*mA*mC*mC*mA*mG*mA* | | XXXXXXXXXX | | |
| | ACAGU | | mG*mU*mA*mA*mC*mA*mG*mU | | XXXX | | |
| WV- | ACAGGUUGUG | 217 | mA*mC*mA*mG*mG*mU*mU*mG*m | 969 | XXXXXXXXXX | 25-mer 2′-OMethyl | DMD |
| 2187 | UCACCAGAGU | | U*mG*mU*mC*mA*mC*mC*mA*mG* | | XXXXXXXXXX | | |
| | AACAG | | mA*mG*mU*mA*mA*mC*mA*mG | | XXXX | | |
| WV- | CCACAGGUUG | 218 | mC*mC*mA*mC*mA*mG*mG*mU*m | 970 | XXXXXXXXXX | 25-mer 2′-OMethyl | DMD |
| 2188 | UGUCACCAGA | | U*mG*mU*mG*mU*mC*mA*mC*mC* | | XXXXXXXXXX | | |
| | GUAAC | | mA*mG*mA*mG*mU*mA*mA*mC | | XXXX | | |
| WV- | ACCACAGGUU | 219 | mA*mC*mC*mA*mC*mA*mG*mG*m | 971 | XXXXXXXXXX | 25-mer 2′-OMethyl | DMD |
| 2189 | GUGUCACCAG | | U*mU*mG*mU*mG*mU*mC*mA*mC* | | XXXXXXXXXX | | |
| | AGUAA | | mC*mA*mG*mA*mG*mU*mA*mA | | XXXX | | |
| WV- | AACCACAGGU | 220 | mA*mA*mC*mC*mA*mC*mA*mG*m | 972 | XXXXXXXXXX | 25-mer 2′-OMethyl | DMD |
| 2190 | UGUGUCACCA | | G*mU*mU*mG*mU*mG*mU*mC*mA* | | XXXXXXXXXX | | |
| | GAGUA | | mC*mC*mA*mG*mA*mG*mU*mA | | XXXX | | |
| WV- | UAACCACAGG | 221 | mU*mA*mA*mC*mC*mA*mC*mA*m | 973 | XXXXXXXXXX | 25-mer 2′-OMethyl | DMD |
| 2191 | UUGUGUCACC | | G*mG*mU*mU*mG*mU*mG*mU*mC* | | XXXXXXXXXX | | |
| | AGAGU | | mA*mC*mC*mA*mG*mA*mG*mU | | XXXX | | |
| WV- | GUAACCACAG | 222 | mG*mU*mA*mA*mC*mC*mA*mC*m | 974 | XXXXXXXXXX | 25-mer 2′-OMethyl | DMD |
| 2192 | GUUGUGUCAC | | A*mG*mG*mU*mU*mG*mU*mG*mU | | XXXXXXXXXX | | |
| | CAGAG | | *mC*mA*mC*mC*mA*mG*mA*mG | | XXXX | | |
| WV- | AGUAACCACA | 223 | mA*mG*mU*mA*mA*mC*mC*mA*m | 975 | XXXXXXXXXX | 25-mer 2′-OMethyl | DMD |
| 2193 | GGUUGUGUCA | | C*mA*mG*mG*mU*mU*mG*mU*mG* | | XXXXXXXXXX | | |
| | CCAGA | | mU*mC*mA*mC*mC*mA*mG*mA | | XXXX | | |
| WV- | UAGUAACCAC | 224 | mU*mA*mG*mU*mA*mA*mC*mC*m | 976 | XXXXXXXXXX | 25-mer 2′-OMethyl | DMD |
| 2194 | AGGUUGUGUC | | A*mC*mA*mG*mG*mU*mU*mG*mU* | | XXXXXXXXXX | | |
| | ACCAG | | mG*mU*mC*mA*mC*mC*mA*mG | | XXXX | | |
| WV- | UUAGUAACCA | 225 | mU*mU*mA*mG*mU*mA*mA*mC*m | 977 | XXXXXXXXXX | 25-mer 2′-OMethyl | DMD |
| 2195 | CAGGUUGUGU | | C*mA*mC*mA*mG*mG*mU*mU*mG* | | XXXXXXXXXX | | |
| | CACCA | | mU*mG*mU*mC*mA*mC*mC*mA | | XXXX | | |
| WV- | CUUAGUAACC | 226 | mC*mU*mU*mA*mG*mU*mA*mA*m | 978 | XXXXXXXXXX | 25-mer 2′-OMethyl | DMD |
| 2196 | ACAGGUUGUG | | C*mC*mA*mC*mA*mG*mG*mU*mU* | | XXXXXXXXXX | | |
| | UCACC | | mG*mU*mG*mU*mC*mA*mC*mC | | XXXX | | |
| WV- | CCUUAGUAACC | 227 | mC*mC*mU*mU*mA*mG*mU*mA*m | 979 | XXXXXXXXXX | 25-mer 2′-OMethyl | DMD |
| 2197 | ACAGGUUGUG | | A*mC*mC*mA*mC*mA*mG*mG*mU* | | XXXXXXXXXX | | |
| | UCAC | | mU*mG*mU*mG*mU*mC*mA*mC | | XXXX | | |
| WV- | UCCUUAGUAA | 228 | mU*mC*mC*mU*mU*mA*mG*mU*m | 980 | XXXXXXXXXX | 25-mer 2′-OMethyl | DMD |
| 2198 | CCACAGGUUG | | A*mA*mC*mC*mA*mC*mA*mG*mG* | | XXXXXXXXXX | | |
| | UGUCA | | mU*mU*mG*mU*mG*mU*mC*mA | | XXXX | | |
| WV- | GUUUCCUUAG | 229 | mG*mU*mU*mU*mC*mC*mU*mU*m | 981 | XXXXXXXXXX | 25-mer 2′-OMethyl | DMD |
| 2199 | UAACCACAGG | | A*mG*mU*mA*mA*mC*mC*mA*mC* | | XXXXXXXXXX | | |
| | UUGUG | | mA*mG*mG*mU*mU*mG*mU*mG | | XXXX | | |
| WV- | AGUUUCCUUA | 230 | mA*mG*mU*mU*mU*mC*mC*mU*m | 982 | XXXXXXXXXX | 25-mer 2′-OMethyl | DMD |
| 2200 | GUAACCACAG | | U*mA*mG*mU*mA*mA*mC*mC*mA* | | XXXXXXXXXX | | |
| | GUUGU | | mC*mA*mG*mG*mU*mU*mG*mU | | XXXX | | |
| WV- | CAGUUUCCUU | 231 | mC*mA*mG*mU*mU*mU*mC*mC*m | 983 | XXXXXXXXXX | 25-mer 2′-OMethyl | DMD |
| 2201 | AGUAACCACA | | U*mU*mA*mG*mU*mA*mA*mC*mC* | | XXXXXXXXXX | | |
| | GGUUG | | mA*mC*mA*mG*mG*mU*mU*mG | | XXXX | | |
| WV- | GCAGUUUCCU | 232 | mG*mC*mA*mG*mU*mU*mU*mC*m | 984 | XXXXXXXXXX | 25-mer 2′-OMethyl | DMD |
| 2202 | UAGUAACCAC | | C*mU*mU*mA*mG*mU*mA*mA*mC* | | XXXXXXXXXX | | |
| | AGGUU | | mC*mA*mC*mA*mG*mG*mU*mU | | XXXX | | |
| WV- | GGCAGUUUCC | 233 | mG*mG*mC*mA*mG*mU*mU*mU*m | 985 | XXXXXXXXXX | 25-mer 2′-OMethyl | DMD |
| 2203 | UUAGUAACCA | | C*mC*mU*mU*mA*mG*mU*mA*mA* | | XXXXXXXXXX | | |
| | CAGGU | | mC*mC*mA*mC*mA*mG*mG*mU | | XXXX | | |
| WV- | UGGCAGUUUC | 234 | mU*mG*mG*mC*mA*mG*mU*mU*m | 986 | XXXXXXXXXX | 25-mer 2′-OMethyl | DMD |
| 2204 | CUUAGUAACC | | U*mC*mC*mU*mU*mA*mG*mU*mA* | | XXXXXXXXXX | | |
| | ACAGG | | mA*mC*mC*mA*mC*mA*mG*mG | | XXXX | | |
| WV- | AUGGCAGUUU | 235 | mA*mU*mG*mG*mC*mA*mG*mU*m | 987 | XXXXXXXXXX | 25-mer 2′-OMethyl | DMD |
| 2205 | CCUUAGUAACC | | U*mU*mC*mC*mU*mU*mA*mG*mU* | | XXXXXXXXXX | | |
| | ACAG | | mA*mA*mC*mC*mA*mC*mA*mG | | XXXX | | |
| WV- | AGAUGGCAGU | 236 | mA*mG*mA*mU*mG*mG*mC*mA*m | 988 | XXXXXXXXXX | 25-mer 2′-OMethyl | DMD |
| 2206 | UUCCUUAGUA | | G*mU*mU*mU*mC*mC*mU*mU*mA* | | XXXXXXXXXX | | |
| | ACCAC | | mG*mU*mA*mA*mC*mC*mA*mC | | XXXX | | |
| WV- | GAGAUGGCAG | 237 | mG*mA*mG*mA*mU*mG*mG*mC*m | 989 | XXXXXXXXXX | 25-mer 2′-OMethyl | DMD |
| 2207 | UUUCCUUAGU | | A*mG*mU*mU*mU*mC*mC*mU*mU* | | XXXXXXXXXX | | |
| | AACCA | | mA*mG*mU*mA*mA*mC*mC*mA | | XXXX | | |
| WV- | GGAGAUGGCA | 238 | mG*mG*mA*mG*mA*mU*mG*mG*m | 990 | XXXXXXXXXX | 25-mer 2′-OMethyl | DMD |
| 2208 | GUUUCCUUAG | | C*mA*mG*mU*mU*mU*mC*mC*mU* | | XXXXXXXXXX | | |
| | UAACC | | mU*mA*mG*mU*mA*mA*mC*mC | | XXXX | | |
| WV- | UGGAGAUGGC | 239 | mU*mG*mG*mA*mG*mA*mU*mG*m | 991 | XXXXXXXXXX | 25-mer 2′-OMethyl | DMD |
| 2209 | AGUUUCCUUA | | G*mC*mA*mG*mU*mU*mU*mC*mC* | | XXXXXXXXXX | | |
| | GUAAC | | mU*mU*mA*mG*mU*mA*mA*mC | | XXXX | | |
| WV- | UUGGAGAUGG | 240 | mU*mU*mG*mG*mA*mG*mA*mU*m | 992 | XXXXXXXXXX | 25-mer 2′-OMethyl | DMD |
| 2210 | CAGUUUCCUU | | G*mG*mC*mA*mG*mU*mU*mU*mC* | | XXXXXXXXXX | | |
| | AGUAA | | mC*mU*mU*mA*mG*mU*mA*mA | | XXXX | | |
| WV- | UUUGGAGAUG | 241 | mU*mU*mU*mG*mG*mA*mG*mA*m | 993 | XXXXXXXXXX | 25-mer 2′-OMethyl | DMD |
| 2211 | GCAGUUUCCU | | U*mG*mG*mC*mA*mG*mU*mU*mU* | | XXXXXXXXXX | | |
| | UAGUA | | mC*mC*mU*mU*mA*mG*mU*mA | | XXXX | | |
| WV- | AGUUUGGAGA | 242 | mA*mG*mU*mU*mU*mG*mG*mA*m | 994 | XXXXXXXXXX | 25-mer 2′-OMethyl | DMD |
| 2212 | UGGCAGUUUC | | G*mA*mU*mG*mG*mC*mA*mG*mU* | | XXXXXXXXXX | | |
| | CUUAG | | mU*mU*mC*mC*mU*mU*mA*mG | | XXXX | | |
| WV- | UAGUUUGGAG | 243 | mU*mA*mG*mU*mU*mU*mG*mG*m | 995 | XXXXXXXXXX | 25-mer 2′-OMethyl | DMD |
| 2213 | AUGGCAGUUU | | A*mG*mA*mU*mG*mG*mC*mA*mG* | | XXXXXXXXXX | | |
| | CCUUA | | mU*mU*mU*mC*mC*mU*mU*mA | | XXXX | | |
| WV- | CUAGUUUGGA | 244 | mC*mU*mA*mG*mU*mU*mU*mG*m | 996 | XXXXXXXXXX | 25-mer 2′-OMethyl | DMD |
| 2214 | GAUGGCAGUU | | G*mA*mG*mA*mU*mG*mG*mC*mA* | | XXXXXXXXXX | | |
| | UCCUU | | mG*mU*mU*mU*mC*mC*mU*mU | | XXXX | | |
| WV- | UCUAGUUUGG | 245 | mU*mC*mU*mA*mG*mU*mU*mU*m | 997 | XXXXXXXXXX | 25-mer 2′-OMethyl | DMD |
| 2215 | AGAUGGCAGU | | G*mG*mA*mG*mA*mU*mG*mG*mC* | | XXXXXXXXXX | | |
| | UUCCU | | mA*mG*mU*mU*mU*mC*mC*mU | | XXXX | | |
| WV- | UUCUAGUUUG | 246 | mU*mU*mC*mU*mA*mG*mU*mU*m | 998 | XXXXXXXXXX | 25-mer 2′-OMethyl | DMD |
| 2216 | GAGAUGGCAG | | U*mG*mG*mA*mG*mA*mU*mG*mG | | XXXXXXXXXX | | |
| | UUUCC | | *mC*mA*mG*mU*mU*mU*mC*mC | | XXXX | | |
| WV- | CAUUUCUAGU | 247 | mC*mA*mU*mU*mU*mC*mU*mA*m | 999 | XXXXXXXXXX | 25-mer 2′-OMethyl | DMD |
| 2217 | UUGGAGAUGG | | G*mU*mU*mU*mG*mG*mA*mG*mA | | XXXXXXXXXX | | |
| | CAGUU | | *mU*mG*mG*mC*mA*mG*mU*mU | | XXXX | | |
| WV- | GCAUUUCUAG | 248 | mG*mC*mA*mU*mU*mU*mC*mU*m | 1000 | XXXXXXXXXX | 25-mer 2′-OMethyl | DMD |
| 2218 | UUUGGAGAUG | | A*mG*mU*mU*mU*mG*mG*mA*mG | | XXXXXXXXXX | | |
| | GCAGU | | *mA*mU*mG*mG*mC*mA*mG*mU | | XXXX | | |
| WV- | AUGGCAUUUC | 249 | mA*mU*mG*mG*mC*mA*mU*mU*m | 1001 | XXXXXXXXXX | 25-mer 2′-OMethyl | DMD |
| 2219 | UAGUUUGGAG | | U*mC*mU*mA*mG*mU*mU*mU*mG* | | XXXXXXXXXX | | |
| | AUGGC | | mG*mA*mG*mA*mU*mG*mG*mC | | XXXX | | |
| WV- | GAAGAUGGCA | 250 | mG*mA*mA*mG*mA*mU*mG*mG*m | 1002 | XXXXXXXXXX | 25-mer 2′-OMethyl | DMD |
| 2220 | UUUCUAGUUU | | C*mA*mU*mU*mU*mC*mU*mA*mG* | | XXXXXXXXXX | | |
| | GGAGA | | mU*mU*mU*mG*mG*mA*mG*mA | | XXXX | | |
| WV- | AGGAAGAUGG | 251 | mA*mG*mG*mA*mA*mG*mA*mU*m | 1003 | XXXXXXXXXX | 25-mer 2′-OMethyl | DMD |
| 2221 | CAUUUCUAGU | | G*mG*mC*mA*mU*mU*mU*mC*mU* | | XXXXXXXXXX | | |
| | UUGGA | | mA*mG*mU*mU*mU*mG*mG*mA | | XXXX | | |
| WV- | AAGGAAGAUG | 252 | mA*mA*mG*mG*mA*mA*mG*mA*m | 1004 | XXXXXXXXXX | 25-mer 2′-OMethyl | DMD |
| 2222 | GCAUUUCUAG | | U*mG*mG*mC*mA*mU*mU*mU*mC* | | XXXXXXXXXX | | |
| | UUUGG | | mU*mA*mG*mU*mU*mU*mG*mG | | XXXX | | |
| WV- | CAAGGAAGAU | 253 | mC*mA*mA*mG*mG*mA*mA*mG*m | 1005 | XXXXXXXXXX | 25-mer 2′-OMethyl | DMD |
| 2223 | GGCAUUUCUA | | A*mU*mG*mG*mC*mA*mU*mU*mU* | | XXXXXXXXXX | | |
| | GUUUG | | mC*mU*mA*mG*mU*mU*mU*mG | | XXXX | | |
| WV- | CAUCAAGGAA | 254 | mC*mA*mU*mC*mA*mA*mG*mG*m | 1006 | XXXXXXXXXX | 25-mer 2′-OMethyl | DMD |
| 2224 | GAUGGCAUUU | | A*mA*mG*mA*mU*mG*mG*mC*mA* | | XXXXXXXXXX | | |
| | CUAGU | | mU*mU*mU*mC*mU*mA*mG*mU | | XXXX | | |
| WV- | ACAUCAAGGA | 255 | mA*mC*mA*mU*mC*mA*mA*mG*m | 1007 | XXXXXXXXXX | 25-mer 2′-OMethyl | DMD |
| 2225 | AGAUGGCAUU | | G*mA*mA*mG*mA*mU*mG*mG*mC* | | XXXXXXXXXX | | |
| | UCUAG | | mA*mU*mU*mU*mC*mU*mA*mG | | XXXX | | |
| WV- | AACAUCAAGG | 256 | mA*mA*mC*mA*mU*mC*mA*mA*m | 1008 | XXXXXXXXXX | 25-mer 2′-OMethyl | DMD |
| 2226 | AAGAUGGCAU | | G*mG*mA*mA*mG*mA*mU*mG*mG | | XXXXXXXXXX | | |
| | UUCUA | | *mC*mA*mU*mU*mU*mC*mU*mA | | XXXX | | |
| WV- | CAACAUCAAG | 257 | mC*mA*mA*mC*mA*mU*mC*mA*m | 1009 | XXXXXXXXXX | 25-mer 2′-OMethyl | DMD |
| 2227 | GAAGAUGGCA | | A*mG*mG*mA*mA*mG*mA*mU*mG | | XXXXXXXXXX | | |
| | UUUCU | | *mG*mC*mA*mU*mU*mU*mC*mU | | XXXX | | |
| WV- | CUCCAACAUCA | 258 | mC*mU*mC*mC*mA*mA*mC*mA*m | 1010 | XXXXXXXXXX | 25-mer 2′-OMethyl | DMD |
| 2228 | AGGAAGAUGG | | U*mC*mA*mA*mG*mG*mA*mA*mG* | | XXXXXXXXXX | | |
| | CAUU | | mA*mU*mG*mG*mC*mA*mU*mU | | XXXX | | |
| WV- | ACCUCCAACAU | 259 | mA*mC*mC*mU*mC*mC*mA*mA*m | 1011 | XXXXXXXXXX | 25-mer 2′-OMethyl | DMD |
| 2229 | CAAGGAAGAU | | C*mA*mU*mC*mA*mA*mG*mG*mA* | | XXXXXXXXXX | | |
| | GGCA | | mA*mG*mA*mU*mG*mG*mC*mA | | XXXX | | |
| WV- | GUACCUCCAAC | 260 | mG*mU*mA*mC*mC*mU*mC*mC*m | 1012 | XXXXXXXXXX | 25-mer 2′-OMethyl | DMD |
| 2230 | AUCAAGGAAG | | A*mA*mC*mA*mU*mC*mA*mA*mG* | | XXXXXXXXXX | | |
| | AUGG | | mG*mA*mA*mG*mA*mU*mG*mG | | XXXX | | |
| WV- | AGGUACCUCCA | 261 | mA*mG*mG*mU*mA*mC*mC*mU*m | 1013 | XXXXXXXXXX | 25-mer 2′-OMethyl | DMD |
| 2231 | ACAUCAAGGA | | C*mC*mA*mA*mC*mA*mU*mC*mA* | | XXXXXXXXXX | | |
| | AGAU | | mA*mG*mG*mA*mA*mG*mA*mU | | XXXX | | |
| WV- | AGAGCAGGUA | 262 | mA*mG*mA*mG*mC*mA*mG*mG*m | 1014 | XXXXXXXXXX | 25-mer 2′-OMethyl | DMD |
| 2232 | CCUCCAACAUC | | U*mA*mC*mC*mU*mC*mC*mA*mA* | | XXXXXXXXXX | | |
| | AAGG | | mC*mA*mU*mC*mA*mA*mG*mG | | XXXX | | |
| WV- | CAGAGCAGGU | 263 | mC*mA*mG*mA*mG*mC*mA*mG*m | 1015 | XXXXXXXXXX | 25-mer 2′-OMethyl | DMD |
| 2233 | ACCUCCAACAU | | G*mU*mA*mC*mC*mU*mC*mC*mA* | | XXXXXXXXXX | | |
| | CAAG | | mA*mC*mA*mU*mC*mA*mA*mG | | XXXX | | |
| WV- | CUGCCAGAGCA | 264 | mC*mU*mG*mC*mC*mA*mG*mA*m | 1016 | XXXXXXXXXX | 25-mer 2′-OMethyl | DMD |
| 2234 | GGUACCUCCAA | | G*mC*mA*mG*mG*mU*mA*mC*mC* | | XXXXXXXXXX | | |
| | CAU | | mU*mC*mC*mA*mA*mC*mA*mU | | XXXX | | |
| WV- | UCUGCCAGAGC | 265 | mU*mC*mU*mG*mC*mC*mA*mG*m | 1017 | XXXXXXXXXX | 25-mer 2′-OMethyl | DMD |
| 2235 | AGGUACCUCCA | | A*mG*mC*mA*mG*mG*mU*mA*mC* | | XXXXXXXXXX | | |
| | ACA | | mC*mU*mC*mC*mA*mA*mC*mA | | XXXX | | |
| WV- | AUCUGCCAGA | 266 | mA*mU*mC*mU*mG*mC*mC*mA*m | 1018 | XXXXXXXXXX | 25-mer 2′-OMethyl | DMD |
| 2236 | GCAGGUACCUC | | G*mA*mG*mC*mA*mG*mG*mU*mA* | | XXXXXXXXXX | | |
| | CAAC | | mC*mC*mU*mC*mC*mA*mA*mC | | XXXX | | |
| WV- | AAUCUGCCAG | 267 | mA*mA*mU*mC*mU*mG*mC*mC*m | 1019 | XXXXXXXXXX | 25-mer 2′-OMethyl | DMD |
| 2237 | AGCAGGUACC | | A*mG*mA*mG*mC*mA*mG*mG*mU* | | XXXXXXXXXX | | |
| | UCCAA | | mA*mC*mC*mU*mC*mC*mA*mA | | XXXX | | |
| WV- | AAAUCUGCCA | 268 | mA*mA*mA*mU*mC*mU*mG*mC*m | 1020 | XXXXXXXXXX | 25-mer 2′-OMethyl | DMD |
| 2238 | GAGCAGGUAC | | C*mA*mG*mA*mG*mC*mA*mG*mG* | | XXXXXXXXXX | | |
| | CUCCA | | mU*mA*mC*mC*mU*mC*mC*mA | | XXXX | | |
| WV- | GAAAUCUGCC | 269 | mG*mA*mA*mA*mU*mC*mU*mG*m | 1021 | XXXXXXXXXX | 25-mer 2′-OMethyl | DMD |
| 2239 | AGAGCAGGUA | | C*mC*mA*mG*mA*mG*mC*mA*mG* | | XXXXXXXXXX | | |
| | CCUCC | | mG*mU*mA*mC*mC*mU*mC*mC | | XXXX | | |
| WV- | UGAAAUCUGC | 270 | mU*mG*mA*mA*mA*mU*mC*mU*m | 1022 | XXXXXXXXXX | 25-mer 2′-OMethyl | DMD |
| 2240 | CAGAGCAGGU | | G*mC*mC*mA*mG*mA*mG*mC*mA* | | XXXXXXXXXX | | |
| | ACCUC | | mG*mG*mU*mA*mC*mC*mU*mC | | XXXX | | |
| WV- | UUGAAAUCUG | 271 | mU*mU*mG*mA*mA*mA*mU*mC*m | 1023 | XXXXXXXXXX | 25-mer 2′-OMethyl | DMD |
| 2241 | CCAGAGCAGG | | U*mG*mC*mC*mA*mG*mA*mG*mC* | | XXXXXXXXXX | | |
| | UACCU | | mA*mG*mG*mU*mA*mC*mC*mU | | XXXX | | |
| WV- | CCCGGUUGAA | 272 | mC*mC*mC*mG*mG*mU*mU*mG*m | 1024 | XXXXXXXXXX | 25-mer 2′-OMethyl | DMD |
| 2242 | AUCUGCCAGA | | A*mA*mA*mU*mC*mU*mG*mC*mC* | | XXXXXXXXXX | | |
| | GCAGG | | mA*mG*mA*mG*mC*mA*mG*mG | | XXXX | | |
| WV- | CCAAGCCCGGU | 273 | mC*mC*mA*mA*mG*mC*mC*mC*m | 1025 | XXXXXXXXXX | 25-mer 2′-OMethyl | DMD |
| 2243 | UGAAAUCUGC | | G*mG*mU*mU*mG*mA*mA*mA*mU | | XXXXXXXXXX | | |
| | CAGA | | *mC*mU*mG*mC*mC*mA*mG*mA | | XXXX | | |
| WV- | UCCAAGCCCGG | 274 | mU*mC*mC*mA*mA*mG*mC*mC*m | 1026 | XXXXXXXXXX | 25-mer 2′-OMethyl | DMD |
| 2244 | UUGAAAUCUG | | C*mG*mG*mU*mU*mG*mA*mA*mA* | | XXXXXXXXXX | | |
| | CCAG | | mU*mC*mU*mG*mC*mC*mA*mG | | XXXX | | |
| WV- | GUCCAAGCCCG | 275 | mG*mU*mC*mC*mA*mA*mG*mC*m | 1027 | XXXXXXXXXX | 25-mer 2′-OMethyl | DMD |
| 2245 | GUUGAAAUCU | | C*mC*mG*mG*mU*mU*mG*mA*mA* | | XXXXXXXXXX | | |
| | GCCA | | mA*mU*mC*mU*mG*mC*mC*mA | | XXXX | | |
| WV- | UCUGUCCAAGC | 276 | mU*mC*mU*mG*mU*mC*mC*mA*m | 1028 | XXXXXXXXXX | 25-mer 2′-OMethyl | DMD |
| 2246 | CCGGUUGAAA | | A*mG*mC*mC*mC*mG*mG*mU*mU* | | XXXXXXXXXX | | |
| | UCUG | | mG*mA*mA*mA*mU*mC*mU*mG | | XXXX | | |
| WV- | UUCUGUCCAA | 277 | mU*mU*mC*mU*mG*mU*mC*mC*m | 1029 | XXXXXXXXXX | 25-mer 2′-OMethyl | DMD |
| 2247 | GCCCGGUUGA | | A*mA*mG*mC*mC*mC*mG*mG*mU* | | XXXXXXXXXX | | |
| | AAUCU | | mU*mG*mA*mA*mA*mU*mC*mU | | XXXX | | |
| WV- | GUUCUGUCCA | 278 | mG*mU*mU*mC*mU*mG*mU*mC*m | 1030 | XXXXXXXXXX | 25-mer 2′-OMethyl | DMD |
| 2248 | AGCCCGGUUG | | C*mA*mA*mG*mC*mC*mC*mG*mG* | | XXXXXXXXXX | | |
| | AAAUC | | mU*mU*mG*mA*mA*mA*mU*mC | | XXXX | | |
| WV- | AGUUCUGUCC | 279 | mA*mG*mU*mU*mC*mU*mG*mU*m | 1031 | XXXXXXXXXX | 25-mer 2′-OMethyl | DMD |
| 2249 | AAGCCCGGUU | | C*mC*mA*mA*mG*mC*mC*mC*mG* | | XXXXXXXXXX | | |
| | GAAAU | | mG*mU*mU*mG*mA*mA*mA*mU | | XXXX | | |
| WV- | AAGUUCUGUC | 280 | mA*mA*mG*mU*mU*mC*mU*mG*m | 1032 | XXXXXXXXXX | 25-mer 2′-OMethyl | DMD |
| 2250 | CAAGCCCGGUU | | U*mC*mC*mA*mA*mG*mC*mC*mC* | | XXXXXXXXXX | | |
| | GAAA | | mG*mG*mU*mU*mG*mA*mA*mA | | XXXX | | |
| WV- | UAAGUUCUGU | 281 | mU*mA*mA*mG*mU*mU*mC*mU*m | 1033 | XXXXXXXXXX | 25-mer 2′-OMethyl | DMD |
| 2251 | CCAAGCCCGGU | | G*mU*mC*mC*mA*mA*mG*mC*mC* | | XXXXXXXXXX | | |
| | UGAA | | mC*mG*mG*mU*mU*mG*mA*mA | | XXXX | | |
| WV- | GUAAGUUCUG | 282 | mG*mU*mA*mA*mG*mU*mU*mC*m | 1034 | XXXXXXXXXX | 25-mer 2′-OMethyl | DMD |
| 2252 | UCCAAGCCCGG | | U*mG*mU*mC*mC*mA*mA*mG*mC* | | XXXXXXXXXX | | |
| | UUGA | | mC*mC*mG*mG*mU*mU*mG*mA | | XXXX | | |
| WV- | GGUAAGUUCU | 283 | mG*mG*mU*mA*mA*mG*mU*mU*m | 1035 | XXXXXXXXXX | 25-mer 2′-OMethyl | DMD |
| 2253 | GUCCAAGCCCG | | C*mU*mG*mU*mC*mC*mA*mA*mG* | | XXXXXXXXXX | | |
| | GUUG | | mC*mC*mC*mG*mG*mU*mU*mG | | XXXX | | |
| WV- | CGGUAAGUUC | 284 | mC*mG*mG*mU*mA*mA*mG*mU*m | 1036 | XXXXXXXXXX | 25-mer 2′-OMethyl | DMD |
| 2254 | UGUCCAAGCCC | | U*mC*mU*mG*mU*mC*mC*mA*mA* | | XXXXXXXXXX | | |
| | GGUU | | mG*mC*mC*mC*mG*mG*mU*mU | | XXXX | | |
| WV- | UCGGUAAGUU | 285 | mU*mC*mG*mG*mU*mA*mA*mG*m | 1037 | XXXXXXXXXX | 25-mer 2′-OMethyl | DMD |
| 2255 | CUGUCCAAGCC | | U*mU*mC*mU*mG*mU*mC*mC*mA* | | XXXXXXXXXX | | |
| | CGGU | | mA*mG*mC*mC*mC*mG*mG*mU | | XXXX | | |
| WV- | GUCGGUAAGU | 286 | mG*mU*mC*mG*mG*mU*mA*mA*m | 1038 | XXXXXXXXXX | 25-mer 2′-OMethyl | DMD |
| 2256 | UCUGUCCAAGC | | G*mU*mU*mC*mU*mG*mU*mC*mC* | | XXXXXXXXXX | | |
| | CCGG | | mA*mA*mG*mC*mC*mC*mG*mG | | XXXX | | |
| WV- | AGUCGGUAAG | 287 | mA*mG*mU*mC*mG*mG*mU*mA*m | 1039 | XXXXXXXXXX | 25-mer 2′-OMethyl | DMD |
| 2257 | UUCUGUCCAA | | A*mG*mU*mU*mC*mU*mG*mU*mC* | | XXXXXXXXXX | | |
| | GCCCG | | mC*mA*mA*mG*mC*mC*mC*mG | | XXXX | | |
| WV- | CAGUCGGUAA | 288 | mC*mA*mG*mU*mC*mG*mG*mU*m | 1040 | XXXXXXXXXX | 25-mer 2′-OMethyl | DMD |
| 2258 | GUUCUGUCCA | | A*mA*mG*mU*mU*mC*mU*mG*mU* | | XXXXXXXXXX | | |
| | AGCCC | | mC*mC*mA*mA*mG*mC*mC*mC | | XXXX | | |
| WV- | AAAGCCAGUC | 289 | mA*mA*mA*mG*mC*mC*mA*mG*m | 1041 | XXXXXXXXXX | 25-mer 2′-OMethyl | DMD |
| 2259 | GGUAAGUUCU | | U*mC*mG*mG*mU*mA*mA*mG*mU* | | XXXXXXXXXX | | |
| | GUCCA | | mU*mC*mU*mG*mU*mC*mC*mA | | XXXX | | |
| WV- | GAAAGCCAGU | 290 | mG*mA*mA*mA*mG*mC*mC*mA*m | 1042 | XXXXXXXXXX | 25-mer 2′-OMethyl | DMD |
| 2260 | CGGUAAGUUC | | G*mU*mC*mG*mG*mU*mA*mA*mG* | | XXXXXXXXXX | | |
| | UGUCC | | mU*mU*mC*mU*mG*mU*mC*mC | | XXXX | | |
| WV- | GUCACCCACCA | 291 | mG*mU*mC*mA*mC*mC*mC*mA*m | 1043 | XXXXXXXXXX | 25-mer 2′-OMethyl | DMD |
| 2261 | UCACCCUCUGU | | C*mC*mA*mU*mC*mA*mC*mC*mC* | | XXXXXXXXXX | | |
| | GAU | | mU*mC*mU*mG*mU*mG*mA*mU | | XXXX | | |
| WV- | GGUCACCCACC | 292 | mG*mG*mU*mC*mA*mC*mC*mC*m | 1044 | XXXXXXXXXX | 25-mer 2′-OMethyl | DMD |
| 2262 | AUCACCCUCUG | | A*mC*mC*mA*mU*mC*mA*mC*mC* | | XXXXXXXXXX | | |
| | UGA | | mC*mU*mC*mU*mG*mU*mG*mA | | XXXX | | |
| WV- | AAGGUCACCCA | 293 | mA*mA*mG*mG*mU*mC*mA*mC*m | 1045 | XXXXXXXXXX | 25-mer 2′-OMethyl | DMD |
| 2263 | CCAUCACCCUC | | C*mC*mA*mC*mC*mA*mU*mC*mA* | | XXXXXXXXXX | | |
| | UGU | | mC*mC*mC*mU*mC*mU*mG*mU | | XXXX | | |
| WV- | CAAGGUCACCC | 294 | mC*mA*mA*mG*mG*mU*mC*mA*m | 1046 | XXXXXXXXXX | 25-mer 2′-OMethyl | DMD |
| 2264 | ACCAUCACCCU | | C*mC*mC*mA*mC*mC*mA*mU*mC* | | XXXXXXXXXX | | |
| | CUG | | mA*mC*mC*mC*mU*mC*mU*mG | | XXXX | | |
| WV- | UCAAGGUCACC | 295 | mU*mC*mA*mA*mG*mG*mU*mC*m | 1047 | XXXXXXXXXX | 25-mer 2′-OMethyl | DMD |
| 2265 | CACCAUCACCC | | A*mC*mC*mC*mA*mC*mC*mA*mU* | | XXXXXXXXXX | | |
| | UCU | | mC*mA*mC*mC*mC*mU*mC*mU | | XXXX | | |
| WV- | CUCAAGGUCAC | 296 | mC*mU*mC*mA*mA*mG*mG*mU*m | 1048 | XXXXXXXXXX | 25-mer 2′-OMethyl | DMD |
| 2266 | CCACCAUCACC | | C*mA*mC*mC*mC*mA*mC*mC*mA* | | XXXXXXXXXX | | |
| | CUC | | mU*mC*mA*mC*mC*mC*mU*mC | | XXXX | | |
| WV- | CUUGAUCAAG | 297 | mC*mU*mU*mG*mA*mU*mC*mA*m | 1049 | XXXXXXXXXX | 25-mer 2′-OMethyl | DMD |
| 2267 | CAGAGAAAGC | | A*mG*mC*mA*mG*mA*mG*mA*mA* | | XXXXXXXXXX | | |
| | CAGUC | | mA*mG*mC*mC*mA*mG*mU*mC | | XXXX | | |
| WV- | AUAACUUGAU | 298 | mA*mU*mA*mA*mC*mU*mU*mG*m | 1050 | XXXXXXXXXX | 25-mer 2′-OMethyl | DMD |
| 2268 | CAAGCAGAGA | | A*mU*mC*mA*mA*mG*mC*mA*mG* | | XXXXXXXXXX | | |
| | AAGCC | | mA*mG*mA*mA*mA*mG*mC*mC | | XXXX | | |
| WV- | AGUAACAGUC | 299 | mA*mG*mU*mA*mA*mC*mA*mG*m | 1051 | XXXXXXXXXX | 20-mer 2′-OMethyl | DMD |
| 2273 | UGAGUAGGAG | | U*mC*mU*mG*mA*mG*mU*mA*mG* | | XXXXXXXXX | | |
| | | | mG*mA*mG | | | | |
| WV- | GAGUAACAGU | 300 | mG*mA*mG*mU*mA*mA*mC*mA*m | 1052 | XXXXXXXXXX | 20-mer 2′-OMethyl | DMD |
| 2274 | CUGAGUAGGA | | G*mU*mC*mU*mG*mA*mG*mU*mA* | | XXXXXXXXX | | |
| | | | mG*mG*mA | | | | |
| WV- | AGAGUAACAG | 301 | mA*mG*mA*mG*mU*mA*mA*mC*m | 1053 | XXXXXXXXXX | 20-mer 2′-OMethyl | DMD |
| 2275 | UCUGAGUAGG | | A*mG*mU*mC*mU*mG*mA*mG*mU* | | XXXXXXXXX | | |
| | | | mA*mG*mG | | | | |
| WV- | CAGAGUAACA | 302 | mC*mA*mG*mA*mG*mU*mA*mA*m | 1054 | XXXXXXXXXX | 20-mer 2′-OMethyl | DMD |
| 2276 | GUCUGAGUAG | | C*mA*mG*mU*mC*mU*mG*mA*mG* | | XXXXXXXXX | | |
| | | | mU*mA*mG | | | | |
| WV- | GUCACCAGAG | 303 | mG*mU*mC*mA*mC*mC*mA*mG*m | 1055 | XXXXXXXXXX | 20-mer 2′-OMethyl | DMD |
| 2277 | UAACAGUCUG | | A*mG*mU*mA*mA*mC*mA*mG*mU* | | XXXXXXXXX | | |
| | | | mC*mU*mG | | | | |
| WV- | UGUCACCAGA | 304 | mU*mG*mU*mC*mA*mC*mC*mA*m | 1056 | XXXXXXXXXX | 20-mer 2′-OMethyl | DMD |
| 2278 | GUAACAGUCU | | G*mA*mG*mU*mA*mA*mC*mA*mG* | | XXXXXXXXX | | |
| | | | mU*mC*mU | | | | |
| WV- | GUGUCACCAG | 305 | mG*mU*mG*mU*mC*mA*mC*mC*m | 1057 | XXXXXXXXXX | 20-mer 2′-OMethyl | DMD |
| 2279 | AGUAACAGUC | | A*mG*mA*mG*mU*mA*mA*mC*mA* | | XXXXXXXXX | | |
| | | | mG*mU*mC | | | | |
| WV- | UGUGUCACCA | 306 | mU*mG*mU*mG*mU*mC*mA*mC*m | 1058 | XXXXXXXXXX | 20-mer 2′-OMethyl | DMD |
| 2280 | GAGUAACAGU | | C*mA*mG*mA*mG*mU*mA*mA*mC* | | XXXXXXXXX | | |
| | | | mA*mG*mU | | | | |
| WV- | UUGUGUCACC | 307 | mU*mU*mG*mU*mG*mU*mC*mA*m | 1059 | XXXXXXXXXX | 20-mer 2′-OMethyl | DMD |
| 2281 | AGAGUAACAG | | C*mC*mA*mG*mA*mG*mU*mA*mA* | | XXXXXXXXX | | |
| | | | mC*mA*mG | | | | |
| WV- | GGUUGUGUCA | 308 | mG*mG*mU*mU*mG*mU*mG*mU*m | 1060 | XXXXXXXXXX | 20-mer 2′-OMethyl | DMD |
| 2282 | CCAGAGUAAC | | C*mA*mC*mC*mA*mG*mA*mG*mU* | | XXXXXXXXX | | |
| | | | mA*mA*mC | | | | |
| WV- | AGGUUGUGUC | 309 | mA*mG*mG*mU*mU*mG*mU*mG*m | 1061 | XXXXXXXXXX | 20-mer 2′-OMethyl | DMD |
| 2283 | ACCAGAGUAA | | U*mC*mA*mC*mC*mA*mG*mA*mG* | | XXXXXXXXX | | |
| | | | mU*mA*mA | | | | |
| WV- | CAGGUUGUGU | 310 | mC*mA*mG*mG*mU*mU*mG*mU*m | 1062 | XXXXXXXXXX | 20-mer 2′-OMethyl | DMD |
| 2284 | CACCAGAGUA | | G*mU*mC*mA*mC*mC*mA*mG*mA* | | XXXXXXXXX | | |
| | | | mG*mU*mA | | | | |
| WV- | ACAGGUUGUG | 311 | mA*mC*mA*mG*mG*mU*mU*mG*m | 1063 | XXXXXXXXXX | 20-mer 2′-OMethyl | DMD |
| 2285 | UCACCAGAGU | | U*mG*mU*mC*mA*mC*mC*mA*mG* | | XXXXXXXXX | | |
| | | | mA*mG*mU | | | | |
| WV- | CACAGGUUGU | 312 | mC*mA*mC*mA*mG*mG*mU*mU*m | 1064 | XXXXXXXXXX | 20-mer 2′-OMethyl | DMD |
| 2286 | GUCACCAGAG | | G*mU*mG*mU*mC*mA*mC*mC*mA* | | XXXXXXXXX | | |
| | | | mG*mA*mG | | | | |
| WV- | CCACAGGUUG | 313 | mC*mC*mA*mC*mA*mG*mG*mU*m | 1065 | XXXXXXXXXX | 20-mer 2′-OMethyl | DMD |
| 2287 | UGUCACCAGA | | U*mG*mU*mG*mU*mC*mA*mC*mC* | | XXXXXXXXX | | |
| | | | mA*mG*mA | | | | |
| WV- | ACCACAGGUU | 314 | mA*mC*mC*mA*mC*mA*mG*mG*m | 1066 | XXXXXXXXXX | 20-mer 2′-OMethyl | DMD |
| 2288 | GUGUCACCAG | | U*mU*mG*mU*mG*mU*mC*mA*mC* | | XXXXXXXXX | | |
| | | | mC*mA*mG | | | | |
| WV- | AACCACAGGU | 315 | mA*mA*mC*mC*mA*mC*mA*mG*m | 1067 | XXXXXXXXXX | 20-mer 2′-OMethyl | DMD |
| 2289 | UGUGUCACCA | | G*mU*mU*mG*mU*mG*mU*mC*mA* | | XXXXXXXXX | | |
| | | | mC*mC*mA | | | | |
| WV- | UAACCACAGG | 316 | mU*mA*mA*mC*mC*mA*mC*mA*m | 1068 | XXXXXXXXXX | 20-mer 2′-OMethyl | DMD |
| 2290 | UUGUGUCACC | | G*mG*mU*mU*mG*mU*mG*mU*mC* | | XXXXXXXXX | | |
| | | | mA*mC*mC | | | | |
| WV- | GUAACCACAG | 317 | mG*mU*mA*mA*mC*mC*mA*mC*m | 1069 | XXXXXXXXXX | 20-mer 2′-OMethyl | DMD |
| 2291 | GUUGUGUCAC | | A*mG*mG*mU*mU*mG*mU*mG*mU | | XXXXXXXXX | | |
| | | | *mC*mA*mC | | | | |
| WV- | AGUAACCACA | 318 | mA*mG*mU*mA*mA*mC*mC*mA*m | 1070 | XXXXXXXXXX | 20-mer 2′-OMethyl | DMD |
| 2292 | GGUUGUGUCA | | C*mA*mG*mG*mU*mU*mG*mU*mG* | | XXXXXXXXX | | |
| | | | mU*mC*mA | | | | |
| WV- | CUUAGUAACC | 319 | mC*mU*mU*mA*mG*mU*mA*mA*m | 1071 | XXXXXXXXXX | 20-mer 2′-OMethyl | DMD |
| 2293 | ACAGGUUGUG | | C*mC*mA*mC*mA*mG*mG*mU*mU* | | XXXXXXXXX | | |
| | | | mG*mU*mG | | | | |
| WV- | CCUUAGUAACC | 320 | mC*mC*mU*mU*mA*mG*mU*mA*m | 1072 | XXXXXXXXXX | 20-mer 2′-OMethyl | DMD |
| 2294 | ACAGGUUGU | | A*mC*mC*mA*mC*mA*mG*mG*mU* | | XXXXXXXXX | | |
| | | | mU*mG*mU | | | | |
| WV- | UCCUUAGUAA | 321 | mU*mC*mC*mU*mU*mA*mG*mU*m | 1073 | XXXXXXXXXX | 20-mer 2′-OMethyl | DMD |
| 2295 | CCACAGGUUG | | A*mA*mC*mC*mA*mC*mA*mG*mG* | | XXXXXXXXX | | |
| | | | mU*mU*mG | | | | |
| WV- | UUCCUUAGUA | 322 | mU*mU*mC*mC*mU*mU*mA*mG*m | 1074 | XXXXXXXXXX | 20-mer 2′-OMethyl | DMD |
| 2296 | ACCACAGGUU | | U*mA*mA*mC*mC*mA*mC*mA*mG* | | XXXXXXXXX | | |
| | | | mG*mU*mU | | | | |
| WV- | UUUCCUUAGU | 323 | mU*mU*mU*mC*mC*mU*mU*mA*m | 1075 | XXXXXXXXXX | 20-mer 2′-OMethyl | DMD |
| 2297 | AACCACAGGU | | G*mU*mA*mA*mC*mC*mA*mC*mA* | | XXXXXXXXX | | |
| | | | mG*mG*mU | | | | |
| WV- | GUUUCCUUAG | 324 | mG*mU*mU*mU*mC*mC*mU*mU*m | 1076 | XXXXXXXXXX | 20-mer 2′-OMethyl | DMD |
| 2298 | UAACCACAGG | | A*mG*mU*mA*mA*mC*mC*mA*mC* | | XXXXXXXXX | | |
| | | | mA*mG*mG | | | | |
| WV- | AGUUUCCUUA | 325 | mA*mG*mU*mU*mU*mC*mC*mU*m | 1077 | XXXXXXXXXX | 20-mer 2′-OMethyl | DMD |
| 2299 | GUAACCACAG | | U*mA*mG*mU*mA*mA*mC*mC*mA* | | XXXXXXXXX | | |
| | | | mC*mA*mG | | | | |
| WV- | GCAGUUUCCU | 326 | mG*mC*mA*mG*mU*mU*mU*mC*m | 1078 | XXXXXXXXXX | 20-mer 2′-OMethyl | DMD |
| 2300 | UAGUAACCAC | | C*mU*mU*mA*mG*mU*mA*mA*mC* | | XXXXXXXXX | | |
| | | | mC*mA*mC | | | | |
| WV- | GGCAGUUUCC | 327 | mG*mG*mC*mA*mG*mU*mU*mU*m | 1079 | XXXXXXXXXX | 20-mer 2′-OMethyl | DMD |
| 2301 | UUAGUAACCA | | C*mC*mU*mU*mA*mG*mU*mA*mA* | | XXXXXXXXX | | |
| | | | mC*mC*mA | | | | |
| WV- | UGGCAGUUUC | 328 | mU*mG*mG*mC*mA*mG*mU*mU*m | 1080 | XXXXXXXXXX | 20-mer 2′-OMethyl | DMD |
| 2302 | CUUAGUAACC | | U*mC*mC*mU*mU*mA*mG*mU*mA* | | XXXXXXXXX | | |
| | | | mA*mC*mC | | | | |
| WV- | AUGGCAGUUU | 329 | mA*mU*mG*mG*mC*mA*mG*mU*m | 1081 | XXXXXXXXXX | 20-mer 2′-OMethyl | DMD |
| 2303 | CCUUAGUAAC | | U*mU*mC*mC*mU*mU*mA*mG*mU* | | XXXXXXXXX | | |
| | | | mA*mA*mC | | | | |
| WV- | GAUGGCAGUU | 330 | mG*mA*mU*mG*mG*mC*mA*mG*m | 1082 | XXXXXXXXXX | 20-mer 2′-OMethyl | DMD |
| 2304 | UCCUUAGUAA | | U*mU*mU*mC*mC*mU*mU*mA*mG* | | XXXXXXXXX | | |
| | | | mU*mA*mA | | | | |
| WV- | AGAUGGCAGU | 331 | mA*mG*mA*mU*mG*mG*mC*mA*m | 1083 | XXXXXXXXXX | 20-mer 2′-OMethyl | DMD |
| 2305 | UUCCUUAGUA | | G*mU*mU*mU*mC*mC*mU*mU*mA* | | XXXXXXXXX | | |
| | | | mG*mU*mA | | | | |
| WV- | GGAGAUGGCA | 332 | mG*mG*mA*mG*mA*mU*mG*mG*m | 1084 | XXXXXXXXXX | 20-mer 2′-OMethyl | DMD |
| 2306 | GUUUCCUUAG | | C*mA*mG*mU*mU*mU*mC*mC*mU* | | XXXXXXXXX | | |
| | | | mU*mA*mG | | | | |
| WV- | UGGAGAUGGC | 333 | mU*mG*mG*mA*mG*mA*mU*mG*m | 1085 | XXXXXXXXXX | 20-mer 2′-OMethyl | DMD |
| 2307 | AGUUUCCUUA | | G*mC*mA*mG*mU*mU*mU*mC*mC* | | XXXXXXXXX | | |
| | | | mU*mU*mA | | | | |
| WV- | UUGGAGAUGG | 334 | mU*mU*mG*mG*mA*mG*mA*mU*m | 1086 | XXXXXXXXXX | 20-mer 2′-OMethyl | DMD |
| 2308 | CAGUUUCCUU | | G*mG*mC*mA*mG*mU*mU*mU*mC* | | XXXXXXXXX | | |
| | | | mC*mU*mU | | | | |
| WV- | UUUGGAGAUG | 335 | mU*mU*mU*mG*mG*mA*mG*mA*m | 1087 | XXXXXXXXXX | 20-mer 2′-OMethyl | DMD |
| 2309 | GCAGUUUCCU | | U*mG*mG*mC*mA*mG*mU*mU*mU* | | XXXXXXXXX | | |
| | | | mC*mC*mU | | | | |
| WV- | GUUUGGAGAU | 336 | mG*mU*mU*mU*mG*mG*mA*mG*m | 1088 | XXXXXXXXXX | 20-mer 2′-OMethyl | DMD |
| 2310 | GGCAGUUUCC | | A*mU*mG*mG*mC*mA*mG*mU*mU* | | XXXXXXXXX | | |
| | | | mU*mC*mC | | | | |
| WV- | CUAGUUUGGA | 337 | mC*mU*mA*mG*mU*mU*mU*mG*m | 1089 | XXXXXXXXXX | 20-mer 2′-OMethyl | DMD |
| 2311 | GAUGGCAGUU | | G*mA*mG*mA*mU*mG*mG*mC*mA* | | XXXXXXXXX | | |
| | | | mG*mU*mU | | | | |
| WV- | UCUAGUUUGG | 338 | mU*mC*mU*mA*mG*mU*mU*mU*m | 1090 | XXXXXXXXXX | 20-mer 2′-OMethyl | DMD |
| 2312 | AGAUGGCAGU | | G*mG*mA*mG*mA*mU*mG*mG*mC* | | XXXXXXXXX | | |
| | | | mA*mG*mU | | | | |
| WV- | AUUUCUAGUU | 339 | mA*mU*mU*mU*mC*mU*mA*mG*m | 1091 | XXXXXXXXXX | 20-mer 2′-OMethyl | DMD |
| 2313 | UGGAGAUGGC | | U*mU*mU*mG*mG*mA*mG*mA*mU | | XXXXXXXXX | | |
| | | | *mG*mG*mC | | | | |
| WV- | UGGCAUUUCU | 340 | mU*mG*mG*mC*mA*mU*mU*mU*m | 1092 | XXXXXXXXXX | 20-mer 2′-OMethyl | DMD |
| 2314 | AGUUUGGAGA | | C*mU*mA*mG*mU*mU*mU*mG*mG* | | XXXXXXXXX | | |
| | | | mA*mG*mA | | | | |
| WV- | GAUGGCAUUU | 341 | mG*mA*mU*mG*mG*mC*mA*mU*m | 1093 | XXXXXXXXXX | 20-mer 2′-OMethyl | DMD |
| 2315 | CUAGUUUGGA | | U*mU*mC*mU*mA*mG*mU*mU*mU* | | XXXXXXXXX | | |
| | | | mG*mG*mA | | | | |
| WV- | AGAUGGCAUU | 342 | mA*mG*mA*mU*mG*mG*mC*mA*m | 1094 | XXXXXXXXXX | 20-mer 2′-OMethyl | DMD |
| 2316 | UCUAGUUUGG | | U*mU*mU*mC*mU*mA*mG*mU*mU* | | XXXXXXXXX | | |
| | | | mU*mG*mG | | | | |
| WV- | AAGAUGGCAU | 343 | mA*mA*mG*mA*mU*mG*mG*mC*m | 1095 | XXXXXXXXXX | 20-mer 2′-OMethyl | DMD |
| 2317 | UUCUAGUUUG | | A*mU*mU*mU*mC*mU*mA*mG*mU* | | XXXXXXXXX | | |
| | | | mU*mU*mG | | | | |
| WV- | AGGAAGAUGG | 344 | mA*mG*mG*mA*mA*mG*mA*mU*m | 1096 | XXXXXXXXXX | 20-mer 2′-OMethyl | DMD |
| 2318 | CAUUUCUAGU | | G*mG*mC*mA*mU*mU*mU*mC*mU* | | XXXXXXXXX | | |
| | | | mA*mG*mU | | | | |
| WV- | AAGGAAGAUG | 345 | mA*mA*mG*mG*mA*mA*mG*mA*m | 1097 | XXXXXXXXXX | 20-mer 2′-OMethyl | DMD |
| 2319 | GCAUUUCUAG | | U*mG*mG*mC*mA*mU*mU*mU*mC* | | XXXXXXXXX | | |
| | | | mU*mA*mG | | | | |
| WV- | CAAGGAAGAU | 346 | mC*mA*mA*mG*mG*mA*mA*mG*m | 1098 | XXXXXXXXXX | 20-mer 2′-OMethyl | DMD |
| 2320 | GGCAUUUCUA | | A*mU*mG*mG*mC*mA*mU*mU*mU* | | XXXXXXXXX | | |
| | | | mC*mU*mA | | | | |
| WV- | UCAAGGAAGA | 347 | mU*mC*mA*mA*mG*mG*mA*mA*m | 1099 | XXXXXXXXXX | 20-mer 2′-OMethyl | DMD |
| 2321 | UGGCAUUUCU | | G*mA*mU*mG*mG*mC*mA*mU*mU* | | XXXXXXXXX | | |
| | | | mU*mC*mU | | | | |
| WV- | ACAUCAAGGA | 348 | mA*mC*mA*mU*mC*mA*mA*mG*m | 1100 | XXXXXXXXXX | 20-mer 2′-OMethyl | DMD |
| 2322 | AGAUGGCAUU | | G*mA*mA*mG*mA*mU*mG*mG*mC* | | XXXXXXXXX | | |
| | | | mA*mU*mU | | | | |
| WV- | CAACAUCAAG | 349 | mC*mA*mA*mC*mA*mU*mC*mA*m | 1101 | XXXXXXXXXX | 20-mer 2′-OMethyl | DMD |
| 2323 | GAAGAUGGCA | | A*mG*mG*mA*mA*mG*mA*mU*mG | | XXXXXXXXX | | |
| | | | *mG*mC*mA | | | | |
| WV- | UCCAACAUCAA | 350 | mU*mC*mC*mA*mA*mC*mA*mU*m | 1102 | XXXXXXXXXX | 20-mer 2′-OMethyl | DMD |
| 2324 | GGAAGAUGG | | C*mA*mA*mG*mG*mA*mA*mG*mA* | | XXXXXXXXX | | |
| | | | mU*mG*mG | | | | |
| WV- | CCUCCAACAUC | 351 | mC*mC*mU*mC*mC*mA*mA*mC*m | 1103 | XXXXXXXXXX | 20-mer 2′-OMethyl | DMD |
| 2325 | AAGGAAGAU | | A*mU*mC*mA*mA*mG*mG*mA*mA* | | XXXXXXXXX | | |
| | | | mG*mA*mU | | | | |
| WV- | AGGUACCUCCA | 352 | mA*mG*mG*mU*mA*mC*mC*mU*m | 1104 | XXXXXXXXXX | 20-mer 2′-OMethyl | DMD |
| 2326 | ACAUCAAGG | | C*mC*mA*mA*mC*mA*mU*mC*mA* | | XXXXXXXXX | | |
| | | | mA*mG*mG | | | | |
| WV- | CAGGUACCUCC | 353 | mC*mA*mG*mG*mU*mA*mC*mC*m | 1105 | XXXXXXXXXX | 20-mer 2′-OMethyl | DMD |
| 2327 | AACAUCAAG | | U*mC*mC*mA*mA*mC*mA*mU*mC* | | XXXXXXXXX | | |
| | | | mA*mA*mG | | | | |
| WV- | AGAGCAGGUA | 354 | mA*mG*mA*mG*mC*mA*mG*mG*m | 1106 | XXXXXXXXXX | 20-mer 2′-OMethyl | DMD |
| 2328 | CCUCCAACAU | | U*mA*mC*mC*mU*mC*mC*mA*mA* | | XXXXXXXXX | | |
| | | | mC*mA*mU | | | | |
| WV- | CAGAGCAGGU | 355 | mC*mA*mG*mA*mG*mC*mA*mG*m | 1107 | XXXXXXXXXX | 20-mer 2′-OMethyl | DMD |
| 2329 | ACCUCCAACA | | G*mU*mA*mC*mC*mU*mC*mC*mA* | | XXXXXXXXX | | |
| | | | mA*mC*mA | | | | |
| WV- | CCAGAGCAGG | 356 | mC*mC*mA*mG*mA*mG*mC*mA*m | 1108 | XXXXXXXXXX | 20-mer 2′-OMethyl | DMD |
| 2330 | UACCUCCAAC | | G*mG*mU*mA*mC*mC*mU*mC*mC* | | XXXXXXXXX | | |
| | | | mA*mA*mC | | | | |
| WV- | GCCAGAGCAG | 357 | mG*mC*mC*mA*mG*mA*mG*mC*m | 1109 | XXXXXXXXXX | 20-mer 2′-OMethyl | DMD |
| 2331 | GUACCUCCAA | | A*mG*mG*mU*mA*mC*mC*mU*mC* | | XXXXXXXXX | | |
| | | | mC*mA*mA | | | | |
| WV- | UGCCAGAGCA | 358 | mU*mG*mC*mC*mA*mG*mA*mG*m | 1110 | XXXXXXXXXX | 20-mer 2′-OMethyl | DMD |
| 2332 | GGUACCUCCA | | C*mA*mG*mG*mU*mA*mC*mC*mU* | | XXXXXXXXX | | |
| | | | mC*mC*mA | | | | |
| WV- | CUGCCAGAGCA | 359 | mC*mU*mG*mC*mC*mA*mG*mA*m | 1111 | XXXXXXXXXX | 20-mer 2′-OMethyl | DMD |
| 2333 | GGUACCUCC | | G*mC*mA*mG*mG*mU*mA*mC*mC* | | XXXXXXXXX | | |
| | | | mU*mC*mC | | | | |
| WV- | UCUGCCAGAGC | 360 | mU*mC*mU*mG*mC*mC*mA*mG*m | 1112 | XXXXXXXXXX | 20-mer 2′-OMethyl | DMD |
| 2334 | AGGUACCUC | | A*mG*mC*mA*mG*mG*mU*mA*mC* | | XXXXXXXXX | | |
| | | | mC*mU*mC | | | | |
| WV- | AUCUGCCAGA | 361 | mA*mU*mC*mU*mG*mC*mC*mA*m | 1113 | XXXXXXXXXX | 20-mer 2′-OMethyl | DMD |
| 2335 | GCAGGUACCU | | G*mA*mG*mC*mA*mG*mG*mU*mA* | | XXXXXXXXX | | |
| | | | mC*mC*mU | | | | |
| WV- | UUGAAAUCUG | 362 | mU*mU*mG*mA*mA*mA*mU*mC*m | 1114 | XXXXXXXXXX | 20-mer 2′-OMethyl | DMD |
| 2336 | CCAGAGCAGG | | U*mG*mC*mC*mA*mG*mA*mG*mC* | | XXXXXXXXX | | |
| | | | mA*mG*mG | | | | |
| WV- | CCCGGUUGAA | 363 | mC*mC*mC*mG*mG*mU*mU*mG*m | 1115 | XXXXXXXXXX | 20-mer 2′-OMethyl | DMD |
| 2337 | AUCUGCCAGA | | A*mA*mA*mU*mC*mU*mG*mC*mC* | | XXXXXXXXX | | |
| | | | mA*mG*mA | | | | |
| WV- | GCCCGGUUGA | 364 | mG*mC*mC*mC*mG*mG*mU*mU*m | 1116 | XXXXXXXXXX | 20-mer 2′-OMethyl | DMD |
| 2338 | AAUCUGCCAG | | G*mA*mA*mA*mU*mC*mU*mG*mC* | | XXXXXXXXX | | |
| | | | mC*mA*mG | | | | |
| WV- | AGCCCGGUUG | 365 | mA*mG*mC*mC*mC*mG*mG*mU*m | 1117 | XXXXXXXXXX | 20-mer 2′-OMethyl | DMD |
| 2339 | AAAUCUGCCA | | U*mG*mA*mA*mA*mU*mC*mU*mG* | | XXXXXXXXX | | |
| | | | mC*mC*mA | | | | |
| WV- | CCAAGCCCGGU | 366 | mC*mC*mA*mA*mG*mC*mC*mC*m | 1118 | XXXXXXXXXX | 20-mer 2′-OMethyl | DMD |
| 2340 | UGAAAUCUG | | G*mG*mU*mU*mG*mA*mA*mA*mU | | XXXXXXXXX | | |
| | | | *mC*mU*mG | | | | |
| WV- | UCCAAGCCCGG | 367 | mU*mC*mC*mA*mA*mG*mC*mC*m | 1119 | XXXXXXXXXX | 20-mer 2′-OMethyl | DMD |
| 2341 | UUGAAAUCU | | C*mG*mG*mU*mU*mG*mA*mA*mA* | | XXXXXXXXX | | |
| | | | mU*mC*mU | | | | |
| WV- | GUCCAAGCCCG | 368 | mG*mU*mC*mC*mA*mA*mG*mC*m | 1120 | XXXXXXXXXX | 20-mer 2′-OMethyl | DMD |
| 2342 | GUUGAAAUC | | C*mC*mG*mG*mU*mU*mG*mA*mA* | | XXXXXXXXX | | |
| | | | mA*mU*mC | | | | |
| WV- | UGUCCAAGCCC | 369 | mU*mG*mU*mC*mC*mA*mA*mG*m | 1121 | XXXXXXXXXX | 20-mer 2′-OMethyl | DMD |
| 2343 | GGUUGAAAU | | C*mC*mC*mG*mG*mU*mU*mG*mA* | | XXXXXXXXX | | |
| | | | mA*mA*mU | | | | |
| WV- | CUGUCCAAGCC | 370 | mC*mU*mG*mU*mC*mC*mA*mA*m | 1122 | XXXXXXXXXX | 20-mer 2′-OMethyl | DMD |
| 2344 | CGGUUGAAA | | G*mC*mC*mC*mG*mG*mU*mU*mG* | | XXXXXXXXX | | |
| | | | mA*mA*mA | | | | |
| WV- | UCUGUCCAAGC | 371 | mU*mC*mU*mG*mU*mC*mC*mA*m | 1123 | XXXXXXXXXX | 20-mer 2′-OMethyl | DMD |
| 2345 | CCGGUUGAA | | A*mG*mC*mC*mC*mG*mG*mU*mU* | | XXXXXXXXX | | |
| | | | mG*mA*mA | | | | |
| WV- | UUCUGUCCAA | 372 | mU*mU*mC*mU*mG*mU*mC*mC*m | 1124 | XXXXXXXXXX | 20-mer 2′-OMethyl | DMD |
| 2346 | GCCCGGUUGA | | A*mA*mG*mC*mC*mC*mG*mG*mU* | | XXXXXXXXX | | |
| | | | mU*mG*mA | | | | |
| WV- | GUUCUGUCCA | 373 | mG*mU*mU*mC*mU*mG*mU*mC*m | 1125 | XXXXXXXXXX | 20-mer 2′-OMethyl | DMD |
| 2347 | AGCCCGGUUG | | C*mA*mA*mG*mC*mC*mC*mG*mG* | | XXXXXXXXX | | |
| | | | mU*mU*mG | | | | |
| WV- | AGUUCUGUCC | 374 | mA*mG*mU*mU*mC*mU*mG*mU*m | 1126 | XXXXXXXXXX | 20-mer 2′-OMethyl | DMD |
| 2348 | AAGCCCGGUU | | C*mC*mA*mA*mG*mC*mC*mC*mG* | | XXXXXXXXX | | |
| | | | mG*mU*mU | | | | |
| WV- | AAGUUCUGUC | 375 | mA*mA*mG*mU*mU*mC*mU*mG*m | 1127 | XXXXXXXXXX | 20-mer 2′-OMethyl | DMD |
| 2349 | CAAGCCCGGU | | U*mC*mC*mA*mA*mG*mC*mC*mC* | | XXXXXXXXX | | |
| | | | mG*mG*mU | | | | |
| WV- | UAAGUUCUGU | 376 | mU*mA*mA*mG*mU*mU*mC*mU*m | 1128 | XXXXXXXXXX | 20-mer 2′-OMethyl | DMD |
| 2350 | CCAAGCCCGG | | G*mU*mC*mC*mA*mA*mG*mC*mC* | | XXXXXXXXX | | |
| | | | mC*mG*mG | | | | |
| WV- | GUAAGUUCUG | 377 | mG*mU*mA*mA*mG*mU*mU*mC*m | 1129 | XXXXXXXXXX | 20-mer 2′-OMethyl | DMD |
| 2351 | UCCAAGCCCG | | U*mG*mU*mC*mC*mA*mA*mG*mC* | | XXXXXXXXX | | |
| | | | mC*mC*mG | | | | |
| WV- | GGUAAGUUCU | 378 | mG*mG*mU*mA*mA*mG*mU*mU*m | 1130 | XXXXXXXXXX | 20-mer 2′-OMethyl | DMD |
| 2352 | GUCCAAGCCC | | C*mU*mG*mU*mC*mC*mA*mA*mG* | | XXXXXXXXX | | |
| | | | mC*mC*mC | | | | |
| WV- | CAGUCGGUAA | 379 | mC*mA*mG*mU*mC*mG*mG*mU*m | 1131 | XXXXXXXXXX | 20-mer 2′-OMethyl | DMD |
| 2353 | GUUCUGUCCA | | A*mA*mG*mU*mU*mC*mU*mG*mU* | | XXXXXXXXX | | |
| | | | mC*mC*mA | | | | |
| WV- | CCAGUCGGUA | 380 | mC*mC*mA*mG*mU*mC*mG*mG*m | 1132 | XXXXXXXXXX | 20-mer 2′-OMethyl | DMD |
| 2354 | AGUUCUGUCC | | U*mA*mA*mG*mU*mU*mC*mU*mG* | | XXXXXXXXX | | |
| | | | mU*mC*mC | | | | |
| WV- | CCACCAUCACC | 381 | mC*mC*mA*mC*mC*mA*mU*mC*m | 1133 | XXXXXXXXXX | 20-mer 2′-OMethyl | DMD |
| 2355 | CUCUGUGAU | | A*mC*mC*mC*mU*mC*mU*mG*mU* | | XXXXXXXXX | | |
| | | | mG*mA*mU | | | | |
| WV- | CCCACCAUCAC | 382 | mC*mC*mC*mA*mC*mC*mA*mU*mC | 1134 | XXXXXXXXXX | 20-mer 2′-OMethyl | DMD |
| 2356 | CCUCUGUGA | | *mA*mC*mC*mC*mU*mC*mU*mG*m | | XXXXXXXXX | | |
| | | | U*mG*mA | | | | |
| WV- | CACCCACCAUC | 383 | mC*mA*mC*mC*mC*mA*mC*mC*mA | 1135 | XXXXXXXXXX | 20-mer 2′-OMethyl | DMD |
| 2357 | ACCCUCUGU | | *mU*mC*mA*mC*mC*mC*mU*mC*m | | XXXXXXXXX | | |
| | | | U*mG*mU | | | | |
| WV- | UCACCCACCAU | 384 | mU*mC*mA*mC*mC*mC*mA*mC*mC | 1136 | XXXXXXXXXX | 20-mer 2′-OMethyl | DMD |
| 2358 | CACCCUCUG | | *mA*mU*mC*mA*mC*mC*mC*mU*m | | XXXXXXXXX | | |
| | | | C*mU*mG | | | | |
| WV- | GUCACCCACCA | 385 | mG*mU*mC*mA*mC*mC*mC*mA*m | 1137 | XXXXXXXXXX | 20-mer 2′-OMethyl | DMD |
| 2359 | UCACCCUCU | | C*mC*mA*mU*mC*mA*mC*mC*mC* | | XXXXXXXXX | | |
| | | | mU*mC*mU | | | | |
| WV- | GGUCACCCACC | 386 | mG*mG*mU*mC*mA*mC*mC*mC*m | 1138 | XXXXXXXXXX | 20-mer 2′-OMethyl | DMD |
| 2360 | AUCACCCUC | | A*mC*mC*mA*mU*mC*mA*mC*mC* | | XXXXXXXXX | | |
| | | | mC*mU*mC | | | | |
| WV- | UCAAGCAGAG | 387 | mU*mC*mA*mA*mG*mC*mA*mG*m | 1139 | XXXXXXXXXX | 20-mer 2′-OMethyl | DMD |
| 2361 | AAAGCCAGUC | | A*mG*mA*mA*mA*mG*mC*mC*mA* | | XXXXXXXXX | | |
| | | | mG*mU*mC | | | | |
| WV- | UUGAUCAAGC | 388 | mU*mU*mG*mA*mU*mC*mA*mA*m | 1140 | XXXXXXXXXX | 20-mer 2′-OMethyl | DMD |
| 2362 | AGAGAAAGCC | | G*mC*mA*mG*mA*mG*mA*mA*mA* | | XXXXXXXXX | | |
| | | | mG*mC*mC | | | | |
| WV- | CAAAGAAGAU | 389 | mC*mA*mA*mA*mG*mA*mA*mG*m | 1141 | XXXXXXXXXX | based on WV-2223 | DMD |
| 2625 | GGCAUUUCUA | | A*mU*mG*mG*mC*mA*mU*mU*mU* | | XXXXXXXXXX | match mouse target | |
| | GUUUG | | mC*mU*mA*mG*mU*mU*mU*mG | | XXXX | sequence | |
| WV- | GCAAAGAAGA | 390 | mG*mC*mA*mA*mA*mG*mA*mA*m | 1142 | XXXXXXXXXX | based on WV-942 match | DMD |
| 2627 | UGGCAUUUCU | | G*mA*mU*mG*mG*mC*mA*mU*mU* | | XXXXXXXXX | mouse target sequence | |
| | | | mU*mC*mU | | | | |
| WV- | GCAAAGAAGA | 391 | fG*fC*fA*fA*fA*fG*mA*mA*mG*mA | 1143 | XXXXXXXXXX | based on WV-1714 | DMD |
| 2628 | UGGCAUUUCU | | *mU*mG*mG*mC*fA*fU*fU*fU*fC*fU | | XXXXXXXXX | match mouse target | |
| | | | | | | sequence | |
| WV- | UCAAGGAAGA | 392 | fU*fC*fA*fA*fG*mG*mA*mA*mG*m | 1144 | XXXXXXXXXX | Exon51: 5F -10OMe-5F | DMD |
| 2095 | UGGCAUUUCU | | A*mU*mG*mG*mC*mA*fU*fU*fU*fC | | XXXXXXXXX | all-PS | Exon51 |
| | | | *fU | | | | |
| WV- | UCAAGGAAGA | 393 | fU*fC*fA*fA*mG*mG*mA*mA*mG*m | 1145 | XXXXXXXXXX | Exon51: 4F-12OMe-4F | DMD |
| 2096 | UGGCAUUUCU | | A*mU*mG*mG*mC*mA*mU*fU*fU*f | | XXXXXXXXX | all-PS | Exon51 |
| | | | C*fU | | | | |
| WV- | UCAAGGAAGA | 394 | fU*fC*fA*mA*mG*mG*mA*mA*mG* | 1146 | XXXXXXXXXX | Exon51: 3F -14OMe-3F | DMD |
| 2097 | UGGCAUUUCU | | mA*mU*mG*mG*mC*mA*mU*mU*fU | | XXXXXXXXX | all-PS | Exon51 |
| | | | *fC*fU | | | | |
| WV- | UCAAGGAAGA | 395 | fU*fC*mA*mA*mG*mG*mA*mA*mG* | 1147 | XXXXXXXXXX | Exon51: 2F -16OMe-2F | DMD |
| 2098 | UGGCAUUUCU | | mA*mU*mG*mG*mC*mA*mU*mU*m | | XXXXXXXXX | all-PS | Exon51 |
| | | | U*fC*fU | | | | |
| WV- | UCAAGGAAGA | 396 | fU*mC*mA*mA*mG*mG*mA*mA*mG | 1148 | XXXXXXXXXX | Exon51: 1F-18OMe-1F | DMD |
| 2099 | UGGCAUUUCU | | *mA*mU*mG*mG*mC*mA*mU*mU* | | XXXXXXXXX | all-PS | Exon51 |
| | | | mU*mC*fU | | | | |
| WV- | UCAAGGAAGA | 397 | fU*fC*fA*fA*fG*fGmA*mA*mG*mA* | 1149 | XXXXXOXXXX | Exon51: 6F-8OMe-6F | DMD |
| 2100 | UGGCAUUUCU | | mU*mG*mG*mCfA*fU*fU*fU*fC*fU | | XXXOXXXXX | 5PS-1PO-7PS-1PO-5PS | Exon51 |
| WV- | UCAAGGAAGA | 398 | fU*fC*fA*fA*fGfGmA*mA*mG*mA*m | 1150 | XXXXOOXXXX | Exon51: 6F-8OMe-6F | DMD |
| 2101 | UGGCAUUUCU | | U*mG*mG*mCfAfU*fU*fU*fC*fU | | XXXOOXXXX | 4PS-2PO-7PS-2PO-4PS | Exon51 |
| WV- | UCAAGGAAGA | 399 | fU*fC*fA*fAfGfGmA*mA*mG*mA*m | 1151 | XXXOOOXXXX | Exon51: 6F-8OMe-6F | DMD |
| 2102 | UGGCAUUUCU | | U*mG*mG*mCfAfUfU*fU*fC*fU | | XXXOOOXXX | 3PS-3PO-7PS-3PO-3PS | Exon51 |
| WV- | UCAAGGAAGA | 400 | fU*fC*fAfAfGfGmA*mA*mG*mA*mU | 1152 | XXOOOOXXXX | Exon51: 6F-8OMe-6F | DMD |
| 2103 | UGGCAUUUCU | | *mG*mG*mCfAfUfUfU*fC*fU | | XXXOOOOXX | 2PS-4PO-7PS-4PO-2PS | Exon51 |
| WV- | UCAAGGAAGA | 401 | fU*fCfAfAfGfGmA*mA*mG*mA*mU* | 1153 | XOOOOOXXXX | Exon51: 6F-8OMe-6F | DMD |
| 2104 | UGGCAUUUCU | | mG*mG*mCfAfUfUfUfC*fU | | XXXOOOOOX | 1PS-5PO-7PS-5PO-1PS | Exon51 |
| WV- | UCAAGGAAGA | 402 | fUfCfAfAfGfGmA*mA*mG*mA*mU*m | 1154 | OOOOOOXXXX | Exon51: 6F-8OMe-6F | DMD |
| 2105 | UGGCAUUUCU | | G*mG*mCfAfUfUfUfCfU | | XXXOOOOOO | 6PO-7PS-6PO | Exon51 |
| WV- | UCAAGGAAGA | 403 | fU*fC*fA*fA*fG*fG*fA*fA*fG*fA*mU | 1155 | XXXXXXXXXX | Exon51: 10F-10OMe | DMD |
| 2106 | UGGCAUUUCU | | *mG*mG*mC*mA*mU*mU*mU*mC*mU | | XXXXXXXXX | all-PS | Exon51 |
| WV- | UCAAGGAAGA | 404 | mU*mC*mA*mA*mG*mG*mA*mA*m | 1156 | XXXXXXXXXX | Exon51: 10OMe-10F | DMD |
| 2107 | UGGCAUUUCU | | G*mA*fU*fG*fG*fC*fA*fU*fU*fU*fC* | | XXXXXXXXX | all-PS | Exon51 |
| | | | fU | | | | |
| WV- | UCAAGGAAGA | 405 | fU*fC*fA*fA*fG*fG*mA*mA*mG*mA | 1157 | XXXXXXXXXX | Exon51: 6F-14OMe all- | DMD |
| 2108 | UGGCAUUUCU | | *mU*mG*mG*mC*mA*mU*mU*mU* | | XXXXXXXXX | PS | Exon51 |
| | | | mC*mU | | | | |
| WV- | UCAAGGAAGA | 406 | mU*mC*mA*mA*mG*mG*mA*mA*m | 1158 | XXXXXXXXXX | Exon51: 14OMe-6F all- | DMD |
| 2109 | UGGCAUUUCU | | G*mA*mU*mG*mG*mC*fA*fU*fU*fU | | XXXXXXXXX | PS | Exon51 |
| | | | *fC*fU | | | | |
| WV-884 | UCAAGGAAGA | 407 | mU*RmC*RmA*RmA*RmG*RmG*Rm | 1159 | RRRRRRRRRRR | All-R; 2′-OMe oligo | Dystrophin |
| | UGGCAUUUCU | | A*RmA*RmG*RmA*RmU*RmG*RmG | | RRRRRRRR | | |
| | | | *RmC*RmA*RmU*RmU*RmU*RmC*R | | | | |
| | | | mU | | | | |
| WV-885 | UCAAGGAAGA | 408 | mU*SmC*RmA*SmA*RmG*SmG*RmA | 1160 | SRSRSRSRSRSR | (SR)9S; 2′-OMe oligo | Dystrophin |
| | UGGCAUUUCU | | *SmA*RmG*SmA*RmU*SmG*RmG*S | | SRSRSRS | | |
| | | | mC*RmA*SmU*RmU*SmU*RmC*SmU | | | | |
| WV-886 | UCAAGGAAGA | 409 | mU*RmC*RmA*RmA*SmG*SmG*SmA | 1161 | RRRSSSSSSSSSS | R3S13R3; 2′-OMe oligo | Dystrophin |
| | UGGCAUUUCU | | *SmA*SmG*SmA*SmU*SmG*SmG*Sm | | SSSRRR | | |
| | | | C*SmA*SmU*SmU*RmU*RmC*RmU | | | | |
| WV-887 | UCAAGGAAGA | 410 | mU*SmC*SmA*SmA*RmG*RmG*RmA | 1162 | SSSRRRRRRRRR | S3R13S3; 2′-OMe oligo | Dystrophin |
| | UGGCAUUUCU | | *RmA*RmG*RmA*RmU*RmG*RmG*R | | RRRRSSS | | |
| | | | mC*RmA*RmU*RmU*SmU*SmC*SmU | | | | |
| WV-888 | UCAAGGAAGA | 411 | mU*RmC*RmA*RmA*RmG*RmG*Sm | 1163 | RRRRRSSRSSRS | R5(SSR)3R5; 2′-OMe | Dystrophin |
| | UGGCAUUUCU | | A*SmA*RmG*SmA*SmU*RmG*SmG* | | SRRRRRR | oligo | |
| | | | SmC*RmA*RmU*RmU*RmU*RmC*R | | | | |
| | | | mU | | | | |
| WV-889 | UCAAGGAAGA | 412 | mU*SmC*SmA*SmA*SmG*SmG*RmA | 1164 | SSSSSRRSRRSR | S5(RRS)3S5; 2′-OMe | Dystrophin |
| | UGGCAUUUCU | | *RmA*SmG*RmA*RmU*SmG*RmG*R | | RSSSSSS | oligo | |
| | | | mC*SmA*SmU*SmU*SmU*SmC*SmU | | | | |
| WV-890 | UCAAGGAAGA | 413 | mU*RmC*RmA*RmA*SmG*SmG*Rm | 1165 | RRRSSRRSRRRS | R3S2R2SR3SR2S2R3; | Dystrophin |
| | UGGCAUUUCU | | A*RmA*SmG*RmA*RmU*RmG*SmG* | | RRSSRRR | 2′-OMe oligo | |
| | | | RmC*RmA*SmU*SmU*RmU*RmC*RmU | | | | |
| WV-891 | UCAAGGAAGA | 414 | mU*SmC*SmA*SmA*RmG*RmG*SmA | 1166 | SSSRRSSRSSSRS | S3R2S2RS3RS2R2S3; | Dystrophin |
| | UGGCAUUUCU | | *SmA*RmG*SmA*SmU*SmG*RmG*S | | SRRSSS | 2′-OMe oligo | |
| | | | mC*SmA*RmU*RmU*SmU*SmC*SmU | | | | |
| WV-892 | UCAAGGAAGA | 415 | mU*SmC*RmA*RmA*RmG*RmG*Rm | 1167 | SRRRRRRRRRR | SR17S; 2′-OMe | Dystrophin |
| | UGGCAUUUCU | | A*RmA*RmG*RmA*RmU*RmG*RmG | | RRRRRRRS | chimeric oligo | |
| | | | *RmC*RmA*RmU*RmU*RmU*RmC*S | | | | |
| | | | mU | | | | |
| WV-893 | UCAAGGAAGA | 416 | mU*RmC*SmA*SmA*SmG*SmG*SmA | 1168 | RSSSSSSSSSSSS | RS17R; 2′-OMe | Dystrophin |
| | UGGCAUUUCU | | *SmA*SmG*SmA*SmU*SmG*SmG*Sm | | SSSSSR | chimeric oligo | |
| | | | C*SmA*SmU*SmU*SmU*SmC*RmU | | | | |
| WV-894 | UCAAGGAAGA | 417 | mU*SmC*RmA*SmA*SmG*RmG*RmA | 1169 | SRSSRRSSRSSR | GC(R) and AU(S) 2′- | Dystrophin |
| | UGGCAUUUCU | | *SmA*SmG*RmA*SmU*SmG*RmG*R | | RRSSSSR | OMe oligo | |
| | | | mC*RmA*SmU*SmU*SmU*SmC*RmU | | | | |
| WV-895 | UCAAGGAAGA | 418 | mU*RmC*SmA*RmA*RmG*SmG*SmA | 1170 | RSRRSSRRSRRS | GC(S) and AU(R) 2′- | Dystrophin |
| | UGGCAUUUCU | | *RmA*RmG*SmA*RmU*RmG*SmG*S | | SSRRRRS | OMe oligo | |
| | | | mC*SmA*RmU*RmU*RmU*RmC*SmU | | | | |
| WV-896 | UCAAGGAAGA | 419 | mU*SmC*SmA*RmA*RmG*RmG*Rm | 1171 | SSRRRRRRRRSR | GA(R) and CU(S) 2′- | Dystrophin |
| | UGGCAUUUCU | | A*RmA*RmG*RmA*RmU*SmG*RmG* | | RSRSSSS | OMe oligo | |
| | | | RmC*SmA*RmU*SmU*SmU*SmC*SmU | | | | |
| WV-897 | UCAAGGAAGA | 420 | mU*RmC*RmA*SmA*SmG*SmG*SmA | 1172 | RRSSSSSSSSRSS | GA(S) and CU(R) 2′- | Dystrophin |
| | UGGCAUUUCU | | *SmA*SmG*SmA*SmU*RmG*SmG*S | | RSRRRR | OMe oligo | |
| | | | mC*RmA*SmU*RmU*RmU*RmC*RmU | | | | |
| WV- | GGCCAAACCUC | 421 | fG*fG*fC*fC*fA*fA*fA*fC*fC*fU*fC*f | 1173 | XXXXXXXXXX | All 2′-F modified | Exon 23 |
| 1678 | GGCUUACCU | | G*fG*fC*fU*fU*fA*fC*fC*fU | | XXXXXXXXX | | |
| WV- | GGCCAAACCUC | 422 | mG*mG*fC*fC*mA*mA*mA*fC*fC*fU | 1174 | XXXXXXXXXX | 2′-F pyrimidines; 2′- | Exon 23 |
| 1679 | GGCUUACCU | | *fC*mG*mG*fC*fU*fU*mA*fC*fC*fU | | XXXXXXXXX | OMe purines | |
| WV- | GGCCAAACCUC | 423 | fG*fG*mC*mC*fA*fA*fA*mC*mC*mU | 1175 | XXXXXXXXXX | 2′-F purines; 2′-OMe | Exon 23 |
| 1680 | GGCUUACCU | | *mC*fG*fG*mC*mU*mU*fA*mC*mC* | | XXXXXXXXX | pyrimidines | |
| | | | mU | | | | |
| WV- | GGCCAAACCUC | 424 | mG*fG*mC*fC*mA*fA*mA*fC*mC*fU | 1176 | XXXXXXXXXX | Alternate 2′-OMe/2′F | Exon 23 |
| 1681 | GGCUUACCU | | *mC*fG*mG*fC*mU*fU*mA*fC*mC*fU | | XXXXXXXXX | | |
| WV- | GGCCAAACCUC | 425 | mG*mG*mC*mC*mA*mA*fA*fC*fC*f | 1177 | XXXXXXXXXX | 2′-OMe/2′-F/2′-OMe | Exon 23 |
| 1682 | GGCUUACCU | | U*fC*fG*fG*fC*mU*mU*mA*mC*mC | | XXXXXXXXX | gapmer | |
| | | | *mU | | | | |
| WV- | GGCCAAACCUC | 426 | fG*fG*fC*fC*fA*fA*mA*mC*mC*mU* | 1178 | XXXXXXXXXX | 2′-F/2′-OMe/2′-F gapmer | Exon 23 |
| 1683 | GGCUUACCU | | mC*mG*mG*mC*fU*fU*fA*fC*fC*fU | | XXXXXXXXX | | |
| WV- | GGCCAAACCUC | 427 | fG*fG*fC*fC*mA*mA*mA*fC*fC*mU* | 1179 | XXXXXXXXXX | 2′-F (C; G); 2′-OMe (U; | Exon 23 |
| 1684 | GGCUUACCU | | fC*fG*fG*fC*mU*mU*mA*fC*fC*mU | | XXXXXXXXX | A) | |
| WV- | GGCCAAACCUC | 428 | mG*mG*mC*mC*fA*fA*fA*mC*mC*f | 1180 | XXXXXXXXXX | 2′-F (U; A); 2′-OMe (C; | Exon 23 |
| 1685 | GGCUUACCU | | U*mC*mG*mG*mC*fU*fU*fA*mC*mC | | XXXXXXXXX | G) | |
| | | | *fU | | | | |
| WV- | UCAAGGAAGA | 429 | fU*fC*fA*fA*fG*fG*fA*fA*fG*fA*fU* | 1181 | XXXXXXXXXX | | Exon 51 |
| 1709 | UGGCAUUUCU | | fG*fG*fC*fA*fU*fU*fU*fC*fU | | XXXXXXXXX | | |
| WV- | UCAAGGAAGA | 430 | fU*fC*mA*mA*mG*mG*mA*mA*mG* | 1182 | XXXXXXXXXX | | Exon 51 |
| 1710 | UGGCAUUUCU | | mA*fU*mG*mG*fC*mA*fU*fU*fU*fC | | XXXXXXXXX | | |
| | | | *fu | | | | |
| WV- | UCAAGGAAGA | 431 | mU*mC*fA*fA*fG*fG*fA*fA*fG*fA*m | 1183 | XXXXXXXXXX | | Exon 51 |
| 1711 | UGGCAUUUCU | | U*fG*fG*mC*fA*mU*mU*mU*mC*mU | | XXXXXXXXX | | |
| WV- | UCAAGGAAGA | 432 | mU*fC*mA*fA*mG*fG*mA*fA*mG*f | 1184 | XXXXXXXXXX | | Exon 51 |
| 1712 | UGGCAUUUCU | | A*mU*fG*mG*fC*mA*fU*mU*fU*mC | | XXXXXXXXX | | |
| | | | *fu | | | | |
| WV- | UCAAGGAAGA | 433 | mU*mC*mA*mA*mG*mG*fA*fA*fG*f | 1185 | XXXXXXXXXX | | Exon 51 |
| 1713 | UGGCAUUUCU | | A*fU*fG*fG*fC*mA*mU*mU*mU*mC | | XXXXXXXXX | | |
| | | | *mU | | | | |
| WV- | UCAAGGAAGA | 434 | fU*fC*fA*fA*fG*fG*mA*mA*mG*mA | 1186 | XXXXXXXXXX | | Exon 51 |
| 1714 | UGGCAUUUCU | | *mU*mG*mG*mC*fA*fU*fUqU*fC*fU | | XXXXXXXXX | | |
| WV- | UCAAGGAAGA | 435 | mU*fC*mA*mA*fG*fG*mA*mA*fG*m | 1187 | XXXXXXXXXX | | Exon 51 |
| 1715 | UGGCAUUUCU | | A*mU*fG*fG*fC*mA*mU*mU*mU*fC | | XXXXXXXXX | | |
| | | | *mU | | | | |
| WV- | UCAAGGAAGA | 436 | fU*mC*fA*fA*mG*mG*fA*fA*mG*fA | 1188 | XXXXXXXXXX | | Exon 51 |
| 1716 | UGGCAUUUCU | | *fU*mG*mG*mC*fA*fU*fU*fU*mC*fU | | XXXXXXXXX | | |
| WV- | GGCCAAACCTC | 437 | G*G*C*C*A*A*A*C*C*T*C*G*G*C* | 1189 | XXXXXXXXXX | Stereorandom DNA | Exon23 |
| 1093 | GGCTTACCT | | T*T*A*C*C*T | | XXXXXXXXX | version of Exon23 full | |
| | | | | | | PS: Analog of WV943 | |
| WV- | GGCCAAACCUC | 438 | mGmGmCmCmAmAmAmCmCmUmCm | 1190 | OOOOOOOOOO | Full PO version of | Exon23 |
| 1094 | GGCUUACCU | | GmGmCmUmUmAmCmCmU | | OOOOOOOOO | WV943 | |
| WV- | GGCCAAACCTC | 439 | G*RG*RC*RC*RA*RA*RA*RC*RC*R | 1191 | RRRRRRRRRRR | Full Rp DNA version of | Exon23 |
| 1095 | GGCTTACCT | | T*RC*RG*RG*RC*RT*RT*RA*RC*RC | | RRRRRRRR | Exon23: Analog of | |
| | | | *RT | | | WV943 | |
| WV- | GGCCAAACCTC | 440 | G*SG*SC*SC*SA*SA*SA*SC*SC*ST* | 1192 | SSSSSSSSSSSSSS | Full Sp DNA version of | Exon23 |
| 1096 | GGCTTACCT | | SC*SG*SG*SC*ST*ST*SA*SC*SC*ST | | SSSSS | Exon23: Analog of | |
| | | | | | | WV943 | |
| WV- | GGCCAAACCUC | 441 | G*SG*SC*SC*SA*SmAmAmCmCmUm | 1193 | SSSSSOOOOOO | Stereopure DNA/2′OMe | Exon23 |
| 1097 | GGCTTACCT | | CmGmGmC T*S T*SA*SC*SC*ST | | OOOSSSSS | chimeric version of | |
| | | | | | | Exon23: Analog of 943 | |
| WV- | GGCCAAACCTC | 442 | mGmGmCmCA*SA*SA*SmCC*ST*SC | 1194 | OOOOSSSOSSSS | Stereopure DNA/2′OMe | Exon23 |
| 1098 | GGCTTACCU | | *SG*SmGC*ST*ST*SmAmCmCmU | | OSSSOOO | chimeric version of | |
| | | | | | | Exon23: Analog of 943 | |
| WV- | GGCCAAACCUC | 443 | G*SmGC*SmCA*SmAA*SmCC*SmUC | 1195 | SOSOSOSOSOSO | Stereopure DNA/2′OMe | Exon23 |
| 1099 | GGCTUACCU | | *SmGG*SmCT*SmUA*SmCC*SmU | | SOSOSOS | chimeric version of | |
| | | | | | | Exon23: Analog of 943 | |
| WV- | GGCCAAACCTC | 444 | mGG*SmCC*SmAA*SmAC*SmCT*Sm | 1196 | OSOSOSOSOSOS | Stereopure DNA/2′OMe | Exon23 |
| 1100 | GGCUTACCU | | CG*SmGC*SmUT*SmAC*SmCmU | | OSOSOSO | chimeric version of | |
| | | | | | | Exon23: Analog of 943 | |
| WV- | GGCCAAACCTC | 445 | G*SG*SmCmCA*SA*SmAmCC*ST*SC | 1197 | SSOOSSOOSSSO | Stereopure DNA/2′OMe | Exon23 |
| 1101 | GGCTUACCU | | *SmGmGC*ST*SmUmAC*SC*SmU | | OSSOOSS | chimeric version of | |
| | | | | | | Exon23: Analog of 943 | |
| WV- | GGCCAAACCUC | 446 | G*SG*SC*SmCmAmAA*SC*SmCmUm | 1198 | SSSOOOSSOOOS | Stereopure DNA/2′OMe | Exon23 |
| 1102 | GGCUUACCU | | CG*SG*SmCmUmUA*SC*SC*SmU | | SOOOSSS | chimeric version of | |
| | | | | | | Exon23: Analog of 943 | |
| WV- | GGCCAAACCTC | 447 | G*SG*SC*SC*SmAmAmAmCC*ST*SC | 1199 | SSSSOOOOSSSO | Stereopure DNA/2′OMe | Exon23 |
| 1103 | GGCUTACCU | | *SmGmGmCmUT*SA*SC*SC*SmU | | OOOSSSS | chimeric version of | |
| | | | | | | Exon23: Analog of 943 | |
| WV- | GGCCAAACCTC | 448 | G*SG*SC*SmCA*SA*SA*SmCC*ST*S | 1200 | SSSOSSSOSSSOS | Stereopure DNA/2′OMe | Exon23 |
| 1104 | GGCTUACCU | | C*SmGG*SC*ST*SmUA*SC*SC*SmU | | SSOSSS | chimeric version of | |
| | | | | | | Exon23: Analog of 943 | |
| WV- | GGCCAAACCUC | 449 | mGmGmCmCA*SA*SA*SC*SC*SmUm | 1201 | OOOOSSSSSOO | Stereopure DNA/2′OMe | Exon23 |
| 1105 | GGCTTACCU | | CmGmGmCT*ST*SA*SC*SC*SmU | | OOOSSSS | chimeric version of | |
| | | | | | | Exon23: Analog of 943 | |
| WV- | GGCCAAACCUC | 450 | G*G*C*C*A*mAmAmCmCmUmCmGm | 1202 | XXXXXOOOOO | Stereorandom | Exon23 |
| 1121 | GGCTTACCT | | GmCT*T*A*C*C*T | | OOOOXXXXX | DNA/2′OMe chimeric | |
| | | | | | | version of Exon23: | |
| | | | | | | Analog of WV1097 | |
| WV- | GGCCAAACCTC | 451 | mGmGmCmCA*A*A*mCC*T*C*G*mG | 1203 | OOOOXXXOXX | Stereorandom | Exon23 |
| 1122 | GGCTTACCU | | C*T*T*mAmCmCmU | | XXOXXXOOO | DNA/2′OMe chimeric | |
| | | | | | | version of Exon23: | |
| | | | | | | Analog of WV1098 | |
| WV- | GGCCAAACCUC | 452 | G*mGC*mCA*mAA*mCC*mUC*mGG | 1204 | XOXOXOXOXO | Stereorandom | Exon23 |
| 1123 | GGCTUACCU | | *mCT*mUA*mCC*mU | | XOXOXOXOX | DNA/2′OMe chimeric | |
| | | | | | | version of Exon23: | |
| | | | | | | Analog of WV1099 | |
| WV- | GGCCAAACCTC | 453 | mGG*mCC*mAA*mAC*mCT*mCG*m | 1205 | OXOXOXOXOX | Stereorandom | Exon23 |
| 1124 | GGCUTACCU | | GC*mUT*mAC*mCmU | | OXOXOXOXO | DNA/2′OMe chimeric | |
| | | | | | | version of Exon23: | |
| | | | | | | Analog of WV11OO | |
| WV- | GGCCAAACCTC | 454 | G*G*mCmCA*A*mAmCmCT*C*mGm | 1206 | XXOOXXOOOX | Stereorandom | Exon23 |
| 1125 | GGCTUACCU | | GC*T*mUmAC*C*mU | | XOOXXOOXX | DNA/2′OMe chimeric | |
| | | | | | | version of Exon23: | |
| | | | | | | Analog of WV1101 | |
| WV- | GGCCAAACCUC | 455 | G*G*C*mCmAmAA*C*mCmUmCG*G | 1207 | XXXOOOXXOO | Stereorandom | Exon23 |
| 1126 | GGCUUACCU | | *mCmUmUA*C*C*mU | | OXXOOOXXX | DNA/2′OMe chimeric | |
| | | | | | | version of Exon23: | |
| | | | | | | Analog of WV1102 | |
| WV- | GGCCAAACCTC | 456 | G*G*C*C*mAmAmAmCC*T*C*mGmG | 1208 | XXXXOOOOXX | Stereorandom | Exon23 |
| 1127 | GGCUTACCU | | mCmUT*A*C*C*mU | | XOOOOXXXX | DNA/2′OMe chimeric | |
| | | | | | | version of Exon23: | |
| | | | | | | Analog of WV1103 | |
| WV- | GGCCAAACCTC | 457 | G*G*C*mCA*A*A*mCC*T*C*mGG*C | 1209 | XXXOXXXOXX | Stereorandom | Exon23 |
| 1128 | GGCTUACCU | | *T*mUA*C*C*mU | | XOXXXOXXX | DNA/2′OMe chimeric | |
| | | | | | | version of Exon23: | |
| | | | | | | Analog of WV1104 | |
| WV- | GGCCAAACCUC | 458 | mGmGmCmCA*A*A*C*C*mUmCmGm | 1210 | OOOOXXXXXO | Stereorandom | Exon23 |
| 1129 | GGCTTACCU | | GmCT*T*A*C*C*mU | | OOOOXXXXX | DNA/2′OMe chimeric | |
| | | | | | | version of Exon23: | |
| | | | | | | Analog of WV1105 | |
| WV- | GGCCAAACCUC | 459 | G*G*mCmCmAmAmAmCmCmUC*mG | 1211 | XXOOOOOOOO | Stereorandom | Exon23 |
| 1130 | GGCUTACCU | | mGC*mUT*A*C*C*mU | | XOOXOXXXX | DNA/2′OMe chimeric | |
| | | | | | | version of Exon23: | |
| | | | | | | Analog of WV1106 | |
| WV- | GGCCAAACCUC | 460 | mG*mG*mC*mC*mA*mAmAmCmCm | 1212 | XXXXXOOOOO | Stereorandom 2′OMe | Exon23 |
| 1141 | GGCUUACCU | | UmCmGmGmCmU*mU*mA*mC*mC* | | OOOOXXXXX | PO/PS chimeric version | |
| | | | mU | | | of exon23: Analog of | |
| | | | | | | WV1097 | |
| WV- | GGCCAAACCUC | 461 | mGmGmCmCmA*mA*mA*mCmC*mU | 1213 | OOOOXXXOXX | Stereorandom 2′OMe | Exon23 |
| 1142 | GGCUUACCU | | *mC*mG*mGmC*mU*mU*mAmCmCmU | | XXOXXXOOO | PO/PS chimeric version | |
| | | | | | | of exon23: Analog of | |
| | | | | | | WV1098 | |
| WV- | GGCCAAACCUC | 462 | mG*mGmC*mCmA*mAmA*mCmC*m | 1214 | XOXOXOXOXO | Stereorandom 2′OMe | Exon23 |
| 1143 | GGCUUACCU | | UmC*mGmG*mCmU*mUmA*mCmC* | | XOXOXOXOX | PO/PS chimeric version | |
| | | | mU | | | of exon23: Analog of | |
| | | | | | | WV1099 | |
| WV- | GGCCAAACCUC | 463 | mGmG*mCmC*mAmA*mAmC*mCmU | 1215 | OXOXOXOXOX | Stereorandom 2′OMe | Exon23 |
| 1144 | GGCUUACCU | | *mCmG*mGmC*mUmU*mAmC*mCmU | | OXOXOXOXO | PO/PS chimeric version | |
| | | | | | | of exon23: Analog of | |
| | | | | | | WV1100 | |
| WV- | GGCCAAACCUC | 464 | mG*mG*mCmCmA*mA*mAmCmCmU | 1216 | XXOOXXOOOX | Stereorandom 2′OMe | Exon23 |
| 1145 | GGCUUACCU | | *mC*mGmGmC*mU*mUmAmC*mC*mU | | XOOXXOOXX | PO/PS chimeric version | |
| | | | | | | of exon23: Analog of | |
| | | | | | | WV1101 | |
| WV- | GGCCAAACCUC | 465 | mG*mG*mC*mCmAmAmA*mC*mCm | 1217 | XXXOOOXXOO | Stereorandom 2′OMe | Exon23 |
| 1146 | GGCUUACCU | | UmCmG*mG*mCmUmUmA*mC*mC* | | OXXOOOXXX | PO/PS chimeric version | |
| | | | mU | | | of exon23: Analog of | |
| | | | | | | WV1102 | |
| WV- | GGCCAAACCUC | 466 | mG*mG*mC*mC*mAmAmAmCmC*m | 1218 | XXXXOOOOXX | Stereorandom 2′OMe | Exon23 |
| 1147 | GGCUUACCU | | U*mC*mGmGmCmUmU*mA*mC*mC* | | XOOOOXXXX | PO/PS chimeric version | |
| | | | mU | | | of exon23: Analog of | |
| | | | | | | WV1103 | |
| WV- | GGCCAAACCUC | 467 | mG*mG*mC*mCmA*mA*mA*mCmC* | 1219 | XXXOXXXOXX | Stereorandom 2′OMe | Exon23 |
| 1148 | GGCUUACCU | | mU*mC*mGmG*mC*mU*mUmA*mC* | | XOXXXOXXX | PO/PS chimeric version | |
| | | | mC*mU | | | of exon23: Analog of | |
| | | | | | | WV1104 | |
| WV- | GGCCAAACCUC | 468 | mGmGmCmCmA*mA*mA*mC*mC*m | 1220 | OOOOXXXXXO | Stereorandom 2′OMe | Exon23 |
| 1149 | GGCUUACCU | | UmCmGmGmCmU*mU*mA*mC*mC* | | OOOOXXXXX | PO/PS chimeric version | |
| | | | mU | | | of exon23: Analog of | |
| | | | | | | WV1105 | |
| WV- | GGCCAAACCUC | 469 | mG*mG*mCmCmAmAmAmCmCmUm | 1221 | XXOOOOOOOO | Stereorandom 2′OMe | Exon23 |
| 1150 | GGCUUACCU | | C*mGmGmC*mUmU*mA*mC*mC*mU | | XOOXOXXXX | PO/PS chimeric version | |
| | | | | | | of exon23: Analog of | |
| | | | | | | WV1106 | |
| WV- | GGCCAAACCUC | 470 | L001*mG*mG*mC*mC*mA*mA*mA* | 1222 | XXXXXXXXXX | All-OMe full-PS | Exon23 |
| 2733 | GGCUUACCU | | mC*mC*mU*mC*mG*mG*mC*mU*m | | XXXXXXXXXX | | |
| | | | U*mA*mC*mC*mU | | | | |
| WV- | GGCCAAACCUC | 471 | L001*mG*mG*mC*mC*mA*mA*mA* | 1223 | XXXXXXXXXX | All-OMe full-PS | Exon23 |
| 2734 | GGCUUACCUG | | mC*mC*mU*mC*mG*mG*mC*mU*m | | XXXXXXXXXX | | |
| | AAAU | | U*mA*mC*mC*mU*mG*mA*mA*mA* | | XXXXX | | |
| | | | mU | | | | |
| WV- | GGCCAAACCUC | 472 | G*SG*SmCmCmAmAmAmCmCmUC*S | 1224 | SSOOOOOOOOS | Stereopure DNA/2′OMe | Exon51 |
| 1106 | GGCUTACCU | | mGmGC*SmUT*SA*SC*SC*SmU | | OOSOSSSS | chimeric version of | |
| | | | | | | Exon23: Analog of 943 | |
| WV- | TCAAGGAAGAT | 473 | T*C*A*A*G*G*A*A*G*A*T*G*G*C* | 1225 | XXXXXXXXXX | Stereorandom DNA | Exon51 |
| 1107 | GGCATTTCT | | A*T*T*T*C*T | | XXXXXXXXX | version of Exon51 full | |
| | | | | | | PS: Analog of WV942 | |
| WV- | UCAAGGAAGA | 474 | mUmCmAmAmGmGmAmAmGmAmU | 1226 | OOOOOOOOOO | Full PO version of | Exon51 |
| 1108 | UGGCAUUUCU | | mGmGmCmAmUmUmUmCmU | | OOOOOOOOO | WV942 | |
| WV- | TCAAGGAAGAT | 475 | T*RC*RA*RA*RG*RG*RA*RA*RG*R | 1227 | RRRRRRRRRRR | Full Rp DNA version of | Exon51 |
| 1109 | GGCATTTCT | | A*RT*RG*RG*RC*RA*RT*RT*RT*RC | | RRRRRRRR | Exon51: Analog of | |
| | | | *RT | | | WV942 | |
| WV- | TCAAGGAAGAT | 476 | T*SC*SA*SA*SG*SG*SA*SA*SG*SA* | 1228 | SSSSSSSSSSSSSS | Full Rp DNA version of | Exon51 |
| 1110 | GGCATTTCT | | ST*SG*SG*SC*SA*ST*ST*ST*SC*ST | | SSSSS | Exon51: Analog of | |
| | | | | | | WV942 | |
| WV- | TCAAGGAAGA | 477 | T*SC*SA*SA*SG*SmGmAmAmGmAm | 1229 | SSSSSOOOOOO | Stereopure DNA/2′OMe | Exon51 |
| 1111 | UGGCATTTCT | | UmGmGmCA*ST*ST*ST*SC*ST | | OOOSSSSS | chimeric version of | |
| | | | | | | Exon51: Analog of 942 | |
| WV- | UCAAGGAAGA | 478 | mUmCmAmAG*SG*SA*SmAG*SA*ST | 1230 | OOOOSSSOSSSS | Stereopure DNA/2′OMe | Exon51 |
| 1112 | TGGCATUUCU | | *SG*SmGC*SA*ST*SmUmUmCmU | | OSSSOOO | chimeric version of | |
| | | | | | | Exon51: Analog of 942 | |
| WV- | TCAAGGAAGAT | 479 | T*SmCA*SmAG*SmGA*SmAG*SmAT | 1231 | SOSOSOSOSOSO | Stereopure DNA/2′OMe | Exon51 |
| 1113 | GGCAUTUCU | | *SmGG*SmCA*SmUT*SmUC*SmU | | SOSOSOS | chimeric version of | |
| | | | | | | Exon51: Analog of 942 | |
| WV- | UCAAGGAAGA | 480 | mUC*SmAA*SmGG*SmAA*SmGA*Sm | 1232 | OSOSOSOSOSOS | Stereopure DNA/2′OMe | Exon51 |
| 1114 | UGGCATUTCU | | UG*SmGC*SmAT*SmUT*SmCmU | | OSOSOSO | chimeric version of | |
| | | | | | | Exon51: Analog of 942 | |
| WV- | TCAAGGAAGAT | 481 | T*SC*SmAmAG*SG*SmAmAG*SA*ST | 1233 | S SOOSSOOSSSO | Stereopure DNA/2′OMe | Exon51 |
| 1115 | GGCAUUTCU | | *SmGmGC*SA*SmUmUT*SC*SmU | | OSSOOSS | chimeric version of | |
| | | | | | | Exon51: Analog of 942 | |
| WV- | TCAAGGAAGA | 482 | T*SC*SA*SmAmGmGA*SA*SmGmAm | 1234 | SSSOOOSSOOOS | Stereopure DNA/2′OMe | Exon51 |
| 1116 | UGGCAUTTCU | | UG*SG*SmCmAmUT*ST*SC*SmU | | SOOOSSS | chimeric version of | |
| | | | | | | Exon51: Analog of 942 | |
| WV- | TCAAGGAAGAT | 483 | T*SC*SA*SA*SmGmGmAmAG*SA*ST | 1235 | SSSSOOOOSSSO | Stereopure DNA/2′OMe | Exon51 |
| 1117 | GGCATTTCU | | *SmGmGmCmAT*ST*ST*SC*SmU | | OOOSSSS | chimeric version of | |
| | | | | | | Exon51: Analog of 942 | |
| WV- | TCAAGGAAGAT | 484 | T*SC*SA*SmAG*SG*SA*SmAG*SA*S | 1236 | SSSOSSSOSSSOS | Stereopure DNA/2′OMe | Exon51 |
| 1118 | GGCAUTTCU | | T*SmGG*SC*SA*SmUT*ST*SC*SmU | | SSOSSS | chimeric version of | |
| | | | | | | Exon51: Analog of 942 | |
| WV- | UCAAGGAAGA | 485 | mUmCmAmAG*SG*SA*SA*SG*SmAm | 1237 | OOOOSSSSSOO | Stereopure DNA/2′OMe | Exon51 |
| 1119 | UGGCATTTCU | | UmGmGmCA*ST*ST*ST*SC*SmU | | OOOSSSSS | chimeric version of | |
| | | | | | | Exon51: Analog of 942 | |
| WV- | TCAAGGAAGAT | 486 | T*SC*SmAmAmGmGmAmAmGmAT*S | 1238 | SSOOOOOOOOS | Stereopure DNA/2′OMe | Exon51 |
| 1120 | GGCATTTCU | | mGmGC*SmAT*ST*ST*SC*SmU | | OOSOSSSS | chimeric version of | |
| | | | | | | Exon51: Analog of 942 | |
| WV- | TCAAGGAAGA | 487 | T*C*A*A*G*mGmAmAmGmAmUmG | 1239 | XXXXXOOOOO | Stereorandom | Exon51 |
| 1131 | UGGCATTTCT | | mGmCA*T*T*T*C*T | | OOOOXXXXX | DNA/2′OMe chimeric | |
| | | | | | | version of Exon51: | |
| | | | | | | Analog of WV1111 | |
| WV- | UCAAGGAAGA | 488 | mUmCmAmAG*G*A*mAG*A*T*G*m | 1240 | OOOOXXXOXX | Stereorandom | Exon51 |
| 1132 | TGGCATUUCU | | GC*A*T*mUmUmCmU | | XXOXXXOOO | DNA/2′OMe chimeric | |
| | | | | | | version of Exon51: | |
| | | | | | | Analog of WV1112 | |
| WV- | TCAAGGAAGAT | 489 | T*mCA*mAG*mGA*mAG*mAT*mGG | 1241 | XOXOXOXOXO | Stereorandom | Exon51 |
| 1133 | GGCAUTUCU | | *mCA*mUT*mUC*mU | | XOXOXOXOX | DNA/2′OMe chimeric | |
| | | | | | | version of Exon51: | |
| | | | | | | Analog of WV1113 | |
| WV- | UCAAGGAAGA | 490 | mUC*mAA*mGG*mAA*mGA*mUG*m | 1242 | OXOXOXOXOX | Stereorandom | Exon51 |
| 1134 | UGGCATUTCU | | GC*mAT*mUT*mCmU | | OXOXOXOXO | DNA/2′OMe chimeric | |
| | | | | | | version of Exon51: | |
| | | | | | | Analog of WV1114 | |
| WV- | TCAAGGAAGAT | 491 | T*C*mAmAG*G*mAmAG*A*T*mGm | 1243 | XXOOXXOOXX | Stereorandom | Exon51 |
| 1135 | GGCAUUTCU | | GC*A*mUmUT*C*mU | | XOOXXOOXX | DNA/2′OMe chimeric | |
| | | | | | | version of Exon51: | |
| | | | | | | Analog of WV1115 | |
| WV- | TCAAGGAAGA | 492 | T*C*A*mAmGmGA*A*mGmAmUG*G | 1244 | XXXOOOXXOO | Stereorandom | Exon51 |
| 1136 | UGGCAUTTCU | | *mCmAmUT*T*C*mU | | OXXOOOXXX | DNA/2′OMe chimeric | |
| | | | | | | version of Exon51: | |
| | | | | | | Analog of WV1116 | |
| WV- | TCAAGGAAGAT | 493 | T*C*A*A*mGmGmAmAG*A*T*mGm | 1245 | XXXXOOOOXX | Stereorandom | Exon51 |
| 1137 | GGCATTTCU | | GmCmAT*T*T*C*mU | | XOOOOXXXX | DNA/2′OMe chimeric | |
| | | | | | | version of Exon51: | |
| | | | | | | Analog of WV1117 | |
| WV- | TCAAGGAAGAT | 494 | T*C*A*mAG*G*A*mAG*A*T*mGG*C | 1246 | XXXOXXXOXX | Stereorandom | Exon51 |
| 1138 | GGCAUTTCU | | *A*mUT*T*C*mU | | XOXXXOXXX | DNA/2′OMe chimeric | |
| | | | | | | version of Exon51: | |
| | | | | | | Analog of WV1118 | |
| WV- | UCAAGGAAGA | 495 | mUmCmAmAG*G*A*A*G*mAmUmG | 1247 | OOOOXXXXXO | Stereorandom | Exon51 |
| 1139 | UGGCATTTCU | | mGmCA*T*T*T*C*mU | | OOOOXXXXX | DNA/2′OMe chimeric | |
| | | | | | | version of Exon51: | |
| | | | | | | Analog of WV1119 | |
| WV- | TCAAGGAAGAT | 496 | T*C*mAmAmGmGmAmAmGmAT*mG | 1248 | XXOOOOOOOO | Stereorandom | Exon51 |
| 1140 | GGCATTTCU | | mGC*mAT*T*T*C*mU | | XOOXOXXXX | DNA/2′OMe chimeric | |
| | | | | | | version of Exon51: | |
| | | | | | | Analog of WV1120 | |
| WV- | UCAAGGAAGA | 497 | mU*mC*mA*mA*mG*mGmAmAmGm | 1249 | XXXXXOOOOO | Stereorandom 2′OMe | Exon51 |
| 1151 | UGGCAUUUCU | | AmUmGmGmCmA*mU*mU*mU*mC* | | OOOOXXXXX | PO/PS chimeric version | |
| | | | mU | | | of exon51: Analog of | |
| | | | | | | WV1111 | |
| WV- | UCAAGGAAGA | 498 | mUmCmAmAmG*mG*mA*mAmG*mA | 1250 | OOOOXXXOXX | Stereorandom 2′OMe | Exon51 |
| 1152 | UGGCAUUUCU | | *mU*mG*mGmC*mA*mU*mUmUmCmU | | XXOXXXOOO | PO/PS chimeric version | |
| | | | | | | of exon51: Analog of | |
| | | | | | | WV1112 | |
| WV- | UCAAGGAAGA | 499 | mU*mCmA*mAmG*mGmA*mAmG*m | 1251 | XOXOXOXOXO | Stereorandom 2′OMe | Exon51 |
| 1153 | UGGCAUUUCU | | AmU*mGmG*mCmA*mUmU*mUmC* | | XOXOXOXOX | PO/PS chimeric version | |
| | | | mU | | | of exon51: Analog of | |
| | | | | | | WV1113 | |
| WV- | UCAAGGAAGA | 500 | mUmC*mAmA*mGmG*mAmA*mGmA | 1252 | OXOXOXOXOX | Stereorandom 2′OMe | Exon51 |
| 1154 | UGGCAUUUCU | | *mUmG*mGmC*mAmU*mUmU*mCmU | | OXOXOXOXO | PO/PS chimeric version | |
| | | | | | | of exon51: Analog of | |
| | | | | | | WV1114 | |
| WV- | UCAAGGAAGA | 501 | mU*mC*mAmAmG*mG*mAmAmG*m | 1253 | XXOOXXOOXX | Stereorandom 2′OMe | Exon51 |
| 1155 | UGGCAUUUCU | | A*mU*mGmGmC*mA*mUmUmU*mC* | | XOOXXOOXX | PO/PS chimeric version | |
| | | | mU | | | of exon51: Analog of | |
| | | | | | | WV1115 | |
| WV- | UCAAGGAAGA | 502 | mU*mC*mA*mAmGmGmA*mA*mGm | 1254 | XXXOOOXXOO | Stereorandom 2′OMe | Exon51 |
| 1156 | UGGCAUUUCU | | AmUmG*mG*mCmAmUmU*mU*mC* | | OXXOOOXXX | PO/PS chimeric version | |
| | | | mU | | | of exon51: Analog of | |
| | | | | | | WV1116 | |
| WV- | UCAAGGAAGA | 503 | mU*mC*mA*mA*mGmGmAmAmG*m | 1255 | XXXXOOOOXX | Stereorandom 2′OMe | Exon51 |
| 1157 | UGGCAUUUCU | | A*mU*mGmGmCmAmU*mU*mU*mC* | | XOOOOXXXX | PO/PS chimeric version | |
| | | | mU | | | of exon51: Analog of | |
| | | | | | | WV1117 | |
| WV- | UCAAGGAAGA | 504 | mU*mC*mA*mAmG*mG*mA*mAmG* | 1256 | XXXOXXXOXX | Stereorandom 2′OMe | Exon51 |
| 1158 | UGGCAUUUCU | | mA*mU*mGmG*mC*mA*mUmU*mU* | | XOXXXOXXX | PO/PS chimeric version | |
| | | | mC*mU | | | of exon51: Analog of | |
| | | | | | | WV1118 | |
| WV- | UCAAGGAAGA | 505 | mUmCmAmAmG*mG*mA*mA*mG*m | 1257 | OOOOXXXXXO | Stereorandom 2′OMe | Exon51 |
| 1159 | UGGCAUUUCU | | AmUmGmGmCmA*mU*mU*mU*mC* | | OOOOXXXXX | PO/PS chimeric version | |
| | | | mU | | | of exon51: Analog of | |
| | | | | | | WV1119 | |
| WV- | UCAAGGAAGA | 506 | mU*mC*mAmAmGmGmAmAmGmAm | 1258 | XXOOOOOOOO | Stereorandom 2′OMe | Exon51 |
| 1160 | UGGCAUUUCU | | U*mGmGmC*mAmU*mU*mU*mC*mU | | XOOXOXXXX | PO/PS chimeric version | |
| | | | | | | of exon51: Analog of | |
| | | | | | | WV1120 | |
| WV- | AGAAAUGCCA | 507 | rArGrArArArUrGrCrCrArUrCrUrUrCrCr | 1259 | OOOOOOOOOO | RNA | Exon51 |
| 1687 | UCUUCCUUGA | | UrUrGrA | | OOOOOOOOO | | |
| WV- | UCAAGGAAGA | 508 | mU*SmC*SmA*RmA*RmG*RmG*Rm | 1260 | SSRRRRRRRRRR | Exon51: 2S-15R-2S | Exon51 |
| 2363 | UGGCAUUUCU | | A*RmA*RmG*RmA*RmU*RmG*RmG | | RRRRRSS | | |
| | | | *RmC*RmA*RmU*RmU*RmU*SmC*S | | | | |
| | | | mU | | | | |
| WV- | UCAAGGAAGA | 509 | mU*SmC*SmA*SmA*SmG*RmG*RmA | 1261 | SSSSRRRRRRRR | Exon51: 4S-11R-4S | Exon51 |
| 2364 | UGGCAUUUCU | | *RmA*RmG*RmA*RmU*RmG*RmG*R | | RRRSSSS | | |
| | | | mC*RmA*RmU*SmU*SmU*SmC*SmU | | | | |
| WV- | UCAAGGAAGA | 510 | mU*SmC*SmA*SmA*SmG*SmG*RmA | 1262 | SSSSSRRRRRRR | Exon51: 5S-9R-5S | Exon51 |
| 2365 | UGGCAUUUCU | | *RmA*RmG*RmA*RmU*RmG*RmG*R | | RRSSSSS | | |
| | | | mC*RmA*SmU*SmU*SmU*SmC*SmU | | | | |
| WV- | UCAAGGAAGA | 511 | mU*SmCmAmAmGmGmAmAmGmAm | 1263 | SOOOOOOOOOO | Exon51: 1S-17PO-1S | Exon51 |
| 2366 | UGGCAUUUCU | | UmGmGmCmAmUmUmUmC*SmU | | OOOOOOOS | | |
| WV- | UCAAGGAAGA | 512 | mU*SmC*SmAmAmGmGmAmAmGmA | 1264 | SSOOOOOOOOO | Exon51: 2S-15PO-2S | Exon51 |
| 2367 | UGGCAUUUCU | | mUmGmGmCmAmUmUmU*SmC*SmU | | OOOOOOSS | | |
| WV- | UCAAGGAAGA | 513 | mU*SmC*SmA*SmAmGmGmAmAmG | 1265 | SSSOOOOOOOO | Exon51: 3S-13PO-3S | Exon51 |
| 2368 | UGGCAUUUCU | | mAmUmGmGmCmAmUmU*SmU*SmC | | OOOOOSSS | | |
| | | | *SmU | | | | |
| WV- | UCAAGGAAGA | 514 | mU*SmC*SmA*SmA*SmGmGmAmAm | 1266 | SSSSOOOOOOO | Exon51: 4S-11PO-4S | Exon51 |
| 2369 | UGGCAUUUCU | | GmAmUmGmGmCmAmU*SmU*SmU* | | OOOOSSSS | | |
| | | | SmC*SmU | | | | |
| WV- | UCAAGGAAGA | 515 | mU*SmC*SmA*SmA*SmG*SmGmAm | 1267 | SSSSSOOOOOO | Exon51: 5S-9PO-5S | Exon51 |
| 2370 | UGGCAUUUCU | | AmGmAmUmGmGmCmA*SmU*SmU* | | OOOSSSSS | | |
| | | | SmU*SmC*SmU | | | | |
| WV- | UCAAGGAAGA | 516 | mU*mCmAmAmGmGmAmAmGmAmU | 1268 | XOOOOOOOOO | Exon51: 1PS-17PO-1PS | Exon51 |
| 2381 | UGGCAUUUCU | | mGmGmCmAmUmUmUmC*mU | | OOOOOOOOX | stereorandom | |
| WV- | UCAAGGAAGA | 517 | mU*mC*mAmAmGmGmAmAmGmAm | 1269 | XXOOOOOOOO | Exon51: 2PS-15PO-2PS | Exon51 |
| 2382 | UGGCAUUUCU | | UmGmGmCmAmUmUmU*mC*mU | | OOOOOOOXX | stereorandom | |
| WV- | UCAAGGAAGA | 518 | mU*mC*mA*mAmGmGmAmAmGmA | 1270 | XXXOOOOOOO | Exon51: 3PS-13PO-3PS | Exon51 |
| 2383 | UGGCAUUUCU | | mUmGmGmCmAmUmU*mU*mC*mU | | OOOOOOXXX | stereorandom | |
| WV- | UCAAGGAAGA | 519 | mU*mC*mA*mA*mGmGmAmAmGmA | 1271 | XXXXOOOOOO | Exon51: 4PS-11PO-4PS | Exon51 |
| 2384 | UGGCAUUUCU | | mUmGmGmCmAmU*mU*mU*mC*mU | | OOOOOXXXX | stereorandom | |
| WV- | UCAAGGAAGA | 520 | mU*mC*mA*mA*mG*mGmAmAmGm | 1272 | XXXXXOOOOO | Exon51: 5PS-9PO-5PS | Exon51 |
| 2385 | UGGCAUUUCU | | AmUmGmGmCmA*mU*mU*mU*mC* | | OOOOXXXXX | stereorandom | |
| | | | mU | | | | |
| WV- | UCAAGGAAGA | 521 | fU*fC*fA*fA*fG*fG*mAmAmGmAmU | 1273 | XXXXXXOOOO | 6F-8OMe-6F 6PS-7PO- | Exon51 |
| 2432 | UGGCAUUUCU | | mGmGmC*fA*fU*fU*fU*fC*fU | | OOOXXXXXX | 6PS | |
| WV- | UCAAGGAAGA | 522 | fU*fC*fA*fA*fG*mGmAmAmGmAmU | 1274 | XXXXXOOOOO | 5F-10OMe-5F 5PS- | Exon51 |
| 2433 | UGGCAUUUCU | | mGmGmCmA*fU*fU*fU*fC*fU | | OOOOXXXXX | 9PO-5PS | |
| WV- | UCAAGGAAGA | 523 | fU*fC*fA*fA*mGmGmAmAmGmAmU | 1275 | XXXXOOOOOO | 4F-12OMe-4F 4PS- | Exon51 |
| 2434 | UGGCAUUUCU | | mGmGmCmAmU*fU*fU*fC*fU | | OOOOOXXXX | 11PO-4PS | |
| WV- | UCAAGGAAGA | 524 | fU*fC*fA*mAmGmGmAmAmGmAmU | 1276 | XXXOOOOOOO | 3F-14OMe-3F 3PS- | Exon51 |
| 2435 | UGGCAUUUCU | | mGmGmCmAmUmU*fU*fC*fU | | OOOOOOXXX | 13PO-3PS | |
| WV- | UCAAGGAAGA | 525 | fU*fC*mAmAmGmGmAmAmGmAmU | 1277 | XXOOOOOOOO | 2F-16OMe-2F 2PS- | Exon51 |
| 2436 | UGGCAUUUCU | | mGmGmCmAmUmUmU*fC*fU | | OOOOOOOXX | 15PO-2PS | |
| WV- | UCAAGGAAGA | 526 | fU*mCmAmAmGmGmAmAmGmAmU | 1278 | XOOOOOOOOO | 1F-18OMe-1F 1PS- | Exon51 |
| 2437 | UGGCAUUUCU | | mGmGmCmAmUmUmUmC*fU | | OOOOOOOOX | 17PO-1PS | |
| WV- | UCAAGGAAGA | 527 | fU*SfC*SfA*SfA*SfG*SfG*SmAmAmG | 1279 | SSSSSSOOOOOO | 6F-8OMe-6F 6Sp-7PO- | Exon51 |
| 2438 | UGGCAUUUCU | | mAmUmGmGmC*SfA*SfU*SfU*SfU*S | | OSSSSSS | 6Sp | |
| | | | fC*SfU | | | | |
| WV- | UCAAGGAAGA | 528 | fU*SfC*SfA*SfA*SfG*SmGmAmAmG | 1280 | SSSSSOOOOOO | 5F-10OMe-5F 5Sp- | Exon51 |
| 2439 | UGGCAUUUCU | | mAmUmGmGmCmA*SfU*SfU*SfU*Sf | | OOOSSSSS | 9PO-5Sp | |
| | | | C*SfU | | | | |
| WV- | UCAAGGAAGA | 529 | fU*SfC*SfA*SfA*SmGmGmAmAmGm | 1281 | SSSSOOOOOOO | 4F-12OMe-4F 4Sp- | Exon51 |
| 2440 | UGGCAUUUCU | | AmUmGmGmCmAmU*SfU*SfU*SfC*S | | OOOOSSSS | 11PO-4Sp | |
| | | | fU | | | | |
| WV- | UCAAGGAAGA | 530 | fU*SfC*SfA*SmAmGmGmAmAmGmA | 1282 | SSSOOOOOOOO | 3F-14OMe-3F 3Sp- | Exon51 |
| 2441 | UGGCAUUUCU | | mUmGmGmCmAmUmU*SfU*SfC*SfU | | OOOOOSSS | 13PO-3Sp | |
| WV- | UCAAGGAAGA | 531 | fU*SfC*SmAmAmGmGmAmAmGmAm | 1283 | SSOOOOOOOOO | 2F-16OMe-2F 2Sp- | Exon51 |
| 2442 | UGGCAUUUCU | | UmGmGmCmAmUmUmU*SfC*SfU | | OOOOOOSS | 15PO-2Sp | |
| WV- | UCAAGGAAGA | 532 | fU*SmCmAmAmGmGmAmAmGmAmU | 1284 | SOOOOOOOOOO | 1F-18OMe-1F 1Sp- | Exon51 |
| 2443 | UGGCAUUUCU | | mGmGmCmAmUmUmUmC*SfU | | OOOOOOOS | 17PO-1Sp | |
| WV- | UCAAGGAAGA | 533 | fU*SfC*SfA*SfA*SfG*SfG*SmA*RmA | 1285 | SSSSSSRRRRRR | 6F-8OMe-6F 6Sp-7Rp- | Exon51 |
| 2444 | UGGCAUUUCU | | *RmG*RmA*RmU*RmG*RmG*RmC*S | | RSSSSSS | 6Sp | |
| | | | fA*SfU*SfU*SfU*SfC*SfU | | | | |
| WV- | UCAAGGAAGA | 534 | fU*SfC*SfA*SfA*SfG*SmG*RmA*Rm | 1286 | SSSSSSRRRRRRR | 5F-10OMe-5F 5Sp-9Rp- | Exon51 |
| 2445 | UGGCAUUUCU | | A*RmG*RmA*RmU*RmG*RmG*RmC* | | RRSSSSS | 5Sp | |
| | | | RmA*SfU*SfU*SfU*SfC*SfU | | | | |
| WV- | UCAAGGAAGA | 535 | fU*SfC*SfA*SfA*SmG*RmG*RmA*Rm | 1287 | SSSSRRRRRRRR | 4F-12OMe-4F 4Sp- | Exon51 |
| 2446 | UGGCAUUUCU | | A*RmG*RmA*RmU*RmG*RmG*RmC* | | RRRSSSS | 11Rp-4Sp | |
| | | | RmA*RmU*SfU*SfU*SfC*SfU | | | | |
| WV- | UCAAGGAAGA | 536 | fU*SfC*SfA*SmA*RmG*RmG*RmA*R | 1288 | SSSRRRRRRRRR | 3F-14OMe-3F 3Sp- | Exon51 |
| 2447 | UGGCAUUUCU | | mA*RmG*RmA*RmU*RmG*RmG*Rm | | RRRRSSS | 13Rp-3Sp | |
| | | | C*RmA*RmU*RmU*SfU*SfC*SfU | | | | |
| WV- | UCAAGGAAGA | 537 | fU*SfC*SmA*RmA*RmG*RmG*RmA* | 1289 | SSRRRRRRRRRR | 2F-16OMe-2F 2Sp- | Exon51 |
| 2448 | UGGCAUUUCU | | RmA*RmG*RmA*RmU*RmG*RmG*R | | RRRRRSS | 15Rp-2Sp | |
| | | | mC*RmA*RmU*RmU*RmU*SfC*SfU | | | | |
| WV- | UCAAGGAAGA | 538 | fU*SmC*RmA*RmA*RmG*RmG*RmA | 1290 | SRRRRRRRRRR | 1F-18OMe-1F 1Sp- | Exon51 |
| 2449 | UGGCAUUUCU | | *RmA*RmG*RmA*RmU*RmG*RmG*R | | RRRRRRRS | 17Rp-1Sp | |
| | | | mC*RmA*RmU*RmU*RmU*RmC*SfU | | | | |
| WV- | UCAAGGAAGA | 539 | fU*SfC*SfA*SfA*SfG*SfG*SfA*SfA*R | 1291 | SSSSSSSRRRRRS | 7F-6OMe-7F 7Sp-5Rp- | Exon51 |
| 2526 | UGGCAUUUCU | | mG*RmA*RmU*RmG*RmG*SfC*SfA* | | SSSSSS | 7Sp | |
| | | | SfU*SfU*SfU*SfC*SfU | | | | |
| WV- | UCAAGGAAGA | 540 | fU*SfC*SfA*SfA*SfG*SfG*SfA*SfA*S | 1292 | SSSSSSSSRRRSS | 8F-4OMe-8F 8Sp-3Rp- | Exon51 |
| 2527 | UGGCAUUUCU | | mG*RmA*RmU*RmG*SfG*SfC*SfA*Sf | | SSSSSS | 8Sp | |
| | | | U*SfU*SfU*SfC*SfU | | | | |
| WV- | UCAAGGAAGA | 541 | fU*SfC*SfA*SfA*SfG*SfG*SfA*SfA*Sf | 1293 | SSSSSSSSSRSSS | 9F-2OMe-9F 9Sp-1Rp- | Exon51 |
| 2528 | UGGCAUUUCU | | G*SmA*RmU*SfG*SfG*SfC*SfA*SfU* | | SSSSSS | 9Sp | |
| | | | SfU*SfU*SfC*SfU | | | | |
| WV- | UCAAGGAAGA | 542 | fU*SfC*SfA*SfA*SfG*SfG*SfA*SfAm | 1294 | SSSSSSSOOOOO | 7F-6OMe-7F 75p-5PO- | Exon51 |
| 2529 | UGGCAUUUCU | | GmAmUmGmG*SfC*SfA*SfU*SfU*Sf | | SSSSSSS | 7Sp | |
| | | | U*SfC*SfU | | | | |
| WV- | UCAAGGAAGA | 543 | fU*SfC*SfA*SfA*SfG*SfG*SfA*SfA*S | 1295 | SSSSSSSSOOOSS | 8F-4OMe-8F 8Sp-3PO- | Exon51 |
| 2530 | UGGCAUUUCU | | mGmAmUmG*SfG*SfC*SfA*SfU*SfU* | | SSSSSS | 8Sp | |
| | | | SfU*SfC*SfU | | | | |
| WV- | UCAAGGAAGA | 544 | fU*SfC*SfA*SfA*SfG*SfG*SfA*SfA*Sf | 1296 | SSSSSSSSSOSSS | 9F-2OMe-9F 9Sp-1PO- | Exon51 |
| 2531 | UGGCAUUUCU | | G*SmAmU*SfG*SfG*SfC*SfA*SfU*Sf | | SSSSSS | 9Sp | |
| | | | U*SfU*SfC*SfU | | | | |
| WV- | UCAAGGAAGA | 545 | fU*SfC*SfA*SfA*SfG*SfG*SfA*mA*m | 1297 | SSSSSSXXXXXX | 6F-8OMe-6F 65p-7PS- | Exon51 |
| 2532 | UGGCAUUUCU | | G*mA*mU*mG*mG*fC*SfA*SfU*SfU* | | XSSSSSS | 6Sp | |
| | | | SfU*SfC*SfU | | | | |
| WV- | UCAAGGAAGA | 546 | mU*SmC*SmA*SmA*SmG*SmG*SmA | 1298 | SSSSSSRRRRRR | All-OMe 6Sp-7Rp-6Sp | Exon51 |
| 2533 | UGGCAUUUCU | | *RmA*RmG*RmA*RmU*RmG*RmG*R | | RSSSSSS | | |
| | | | mC*SmA*SmU*SmU*SmU*SmC*SmU | | | | |
| WV- | UCAAGGAAGA | 547 | mU*SmC*SmA*SmA*SmG*SmG*SmA | 1299 | SSSSSSSRRRRRS | All-OMe 7Sp-5Rp-7Sp | Exon51 |
| 2534 | UGGCAUUUCU | | *SmA*RmG*RmA*RmU*RmG*RmG*S | | SSSSSS | | |
| | | | mC*SmA*SmU*SmU*SmU*SmC*SmU | | | | |
| WV- | UCAAGGAAGA | 548 | mU*SmC*SmA*SmA*SmG*SmG*SmA | 1300 | SSSSSSSSRRRSS | All-OMe 8Sp-3Rp-8Sp | Exon51 |
| 2535 | UGGCAUUUCU | | *SmA*SmG*RmA*RmU*RmG*SmG*S | | SSSSSS | | |
| | | | mC*SmA*SmU*SmU*SmU*SmC*SmU | | | | |
| WV- | UCAAGGAAGA | 549 | mU*SmC*SmA*SmA*SmG*SmG*SmA | 1301 | SSSSSSSSSRSSS | All-OMe 9Sp-1Rp-9Sp | Exon51 |
| 2536 | UGGCAUUUCU | | *SmA*SmG*SmA*RmU*SmG*SmG*S | | SSSSSS | | |
| | | | mC*SmA*SmU*SmU*SmU*SmC*SmU | | | | |
| WV- | UCAAGGAAGA | 550 | mU*SmC*SmA*SmA*SmG*SmG*SmA | 1302 | SSSSSSXXXXXX | All-OMe 6Sp-7PS-6Sp | Exon51 |
| 2537 | UGGCAUUUCU | | *mA*mG*mA*mU*mG*mG*mC*SmA* | | XSSSSSS | | |
| | | | SmU*SmU*SmU*SmC*SmU | | | | |
| WV- | UCAAGGAAGA | 551 | L001*mU*mC*mA*mA*mG*mG*mA* | 1303 | XXXXXXXXXX | Drisapersen with C6 | Exon51 |
| 2538 | UGGCAUUUCU | | mA*mG*mA*mU*mG*mG*mC*mA*m | | XXXXXXXXXX | amino linker | |
| | | | U*mU*mU*mC*mU | | | | |
| WV- | UCAAGGAAGA | 552 | Mod013L001*mU*mC*mA*mA*mG*m | 1304 | OXXXXXXXXX | Drisapersen with C6 and | Exon51 |
| 2578 | UGGCAUUUCU | | G*mA*mA*mG*mA*mU*mG*mG*mC* | | XXXXXXXXXXX | Lauric | |
| | | | mA*mU*mU*mU*mC*mU | | | | |
| WV- | UCAAGGAAGA | 553 | Mod014L001*mU*mC*mA*mA*mG*m | 1305 | OXXXXXXXXX | Drisapersen with C6 and | Exon51 |
| 2579 | UGGCAUUUCU | | G*mA*mA*mG*mA*mU*mG*mG*mC* | | XXXXXXXXXXX | Myristic | |
| | | | mA*mU*mU*mU*mC*mU | | | | |
| WV- | UCAAGGAAGA | 554 | Mod005L001*mU*mC*mA*mA*mG*m | 1306 | OXXXXXXXXX | Drisapersen with C6 and | Exon51 |
| 2580 | UGGCAUUUCU | | G*mA*mA*mG*mA*mU*mG*mG*mC* | | XXXXXXXXXXX | Palmitic | |
| | | | mA*mU*mU*mU*mC*mU | | | | |
| WV- | UCAAGGAAGA | 555 | Mod015L001*mU*mC*mA*mA*mG*m | 1307 | OXXXXXXXXX | Drisapersen with C6 and | Exon51 |
| 2581 | UGGCAUUUCU | | G*mA*mA*mG*mA*mU*mG*mG*mC* | | XXXXXXXXXXX | Stearic | |
| | | | mA*mU*mU*mU*mC*mU | | | | |
| WV- | UCAAGGAAGA | 556 | Mod016L001*mU*mC*mA*mA*mG*m | 1308 | OXXXXXXXXX | Drisapersen with C6 and | Exon51 |
| 2582 | UGGCAUUUCU | | G*mA*mA*mG*mA*mU*mG*mG*mC* | | XXXXXXXXXXX | Oleic | |
| | | | mA*mU*mU*mU*mC*mU | | | | |
| WV- | UCAAGGAAGA | 557 | Mod017L001*mU*mC*mA*mA*mG*m | 1309 | OXXXXXXXXX | Drisapersen with C6 and | Exon51 |
| 2583 | UGGCAUUUCU | | G*mA*mA*mG*mA*mU*mG*mG*mC* | | XXXXXXXXXXX | Linoleic | |
| | | | mA*mU*mU*mU*mC*mU | | | | |
| WV- | UCAAGGAAGA | 558 | Mod018L001*mU*mC*mA*mA*mG*m | 1310 | OXXXXXXXXX | Drisapersen with C6 and | Exon51 |
| 2584 | UGGCAUUUCU | | G*mA*mA*mG*mA*mU*mG*mG*mC* | | XXXXXXXXXXX | alpha-Linolenic | |
| | | | mA*mU*mU*mU*mC*mU | | | | |
| WV- | UCAAGGAAGA | 559 | Mod019L001*mU*mC*mA*mA*mG*m | 1311 | OXXXXXXXXX | Drisapersen with C6 and | Exon51 |
| 2585 | UGGCAUUUCU | | G*mA*mA*mG*mA*mU*mG*mG*mC* | | XXXXXXXXXXX | gamma-Linolenic | |
| | | | mA*mU*mU*mU*mC*mU | | | | |
| WV- | UCAAGGAAGA | 560 | Mod006L001*mU*mC*mA*mA*mG*m | 1312 | OXXXXXXXXX | Drisapersen with C6 and | Exon51 |
| 2586 | UGGCAUUUCU | | G*mA*mA*mG*mA*mU*mG*mG*mC* | | XXXXXXXXXXX | DHA | |
| | | | mA*mU*mU*mU*mC*mU | | | | |
| WV- | UCAAGGAAGA | 561 | Mod020L001*mU*mC*mA*mA*mG*m | 1313 | OXXXXXXXXX | Drisapersen with C6 and | Exon51 |
| 2587 | UGGCAUUUCU | | G*mA*mA*mG*mA*mU*mG*mG*mC* | | XXXXXXXXXXX | Turbinaric | |
| | | | mA*mU*mU*mU*mC*mU | | | | |
| WV- | UCAAGGAAGA | 562 | Mod021*mU*mC*mA*mA*mG*mG*m | 1314 | XXXXXXXXXX | Drisapersen with C6 and | Exon51 |
| 2588 | UGGCAUUUCU | | A*mA*mG*mA*mU*mG*mG*mC*mA* | | XXXXXXXXXX | Dilinoleic | |
| | | | mU*mU*mU*mC*mU | | | | |
| WV- | UCAAGGAAGA | 563 | mU*mC*mA*mA*mG*mG*mAmAmG | 1315 | XXXXXXOOOO | All-OMe 6PS-7PO-6PS | Exon51 |
| 2660 | UGGCAUUUCU | | mAmUmGmGmC*mA*mU*mU*mU*m | | OOOXXXXXX | | |
| | | | C*mU | | | | |
| WV- | UCAAGGAAGA | 564 | mU*mC*mA*mA*mG*mG*mA*mAmG | 1316 | XXXXXXXOOO | All-OMe 7PS-5PO-7PS | Exon51 |
| 2661 | UGGCAUUUCU | | mAmUmGmG*mC*mA*mU*mU*mU* | | OOXXXXXXX | | |
| | | | mC*mU | | | | |
| WV- | UCAAGGAAGA | 565 | mU*mC*mA*mA*mG*mG*mA*mA*m | 1317 | XXXXXXXXOO | All-OMe 8PS-3PO-8PS | Exon51 |
| 2662 | UGGCAUUUCU | | GmAmUmG*mG*mC*mA*mU*mU*mU | | OXXXXXXXX | | |
| | | | *mC*mU | | | | |
| WV- | UCAAGGAAGA | 566 | mU*mC*mA*mA*mG*mG*mA*mA*m | 1318 | XXXXXXXXXO | All-OMe 9PS-1PO-9PS | Exon51 |
| 2663 | UGGCAUUUCU | | G*mAmU*mG*mG*mC*mA*mU*mU* | | XXXXXXXXX | | |
| | | | mU*mC*mU | | | | |
| WV- | UCAAGGAAGA | 567 | mU*SmC*SmA*SmA*SmG*SmG*SmA | 1319 | SSSSSSOOOOOO | All-OMe 6Sp-7PO-6Sp | Exon51 |
| 2664 | UGGCAUUUCU | | mAmGmAmUmGmGmC*SmA*SmU*S | | OSSSSSS | | |
| | | | mU*SmU*SmC*SmU | | | | |
| WV- | UCAAGGAAGA | 568 | mU*SmC*SmA*SmA*SmG*SmG*SmA | 1320 | SSSSSSSOOOOO | All-OMe 7Sp-5PO-7Sp | Exon51 |
| 2665 | UGGCAUUUCU | | *SmAmGmAmUmGmG*SmC*SmA*Sm | | SSSSSSS | | |
| | | | U*SmU*SmU*SmC*SmU | | | | |
| WV- | UCAAGGAAGA | 569 | mU*SmC*SmA*SmA*SmG*SmG*SmA | 1321 | SSSSSSSSOOOSS | All-OMe 8Sp-3PO-8Sp | Exon51 |
| 2666 | UGGCAUUUCU | | *SmA*SmGmAmUmG*SmG*SmC*Sm | | SSSSSS | | |
| | | | A*SmU*SmU*SmU*SmC*SmU | | | | |
| WV- | UCAAGGAAGA | 570 | mU*SmC*SmA*SmA*SmG*SmG*SmA | 1322 | SSSSSSSSSOSSS | All-OMe 9Sp-1PO-9Sp | Exon51 |
| 2667 | UGGCAUUUCU | | *SmA*SmG*SmAmU*SmG*SmG*SmC | | SSSSSS | | |
| | | | *SmA*SmU*SmU*SmU*SmC*SmU | | | | |
| WV- | UCAAGGAAGA | 571 | fU*fC*fA*fA*fG*fG*fA*mAmGmAmU | 1323 | XXXXXXXOOO | 7F-6OMe-7F 7PS-5PO- | Exon51 |
| 2668 | UGGCAUUUCU | | mGmG*fC*fA*fU*fU*fU*fC*fU | | OOXXXXXXX | 7PS | |
| WV- | UCAAGGAAGA | 572 | fU*fC*fA*fA*fG*fG*fA*fA*mGmAmU | 1324 | XXXXXXXXOO | 8F-4OMe-8F 8PS-3PO- | Exon51 |
| 2669 | UGGCAUUUCU | | mG*fG*fC*fA*fil*fLi*fU*fC*fU | | OXXXXXXXX | 8PS | |
| WV- | UCAAGGAAGA | 573 | fU*fC*fA*fA*fG*fG*fA*fA*fG*mAmU | 1325 | XXXXXXXXXO | 9F-2OMe-9F 9PS-1PO- | Exon51 |
| 2670 | UGGCAUUUCU | | *fG*fG*fC*fAqUqUqU*fC*fU | | XXXXXXXXX | 9PS | |
| WV- | UCAAGGAAGA | 574 | fU*SfC*SfA*SfA*SfG*SfG*SmAmAmG | 1326 | SSSSSSOOOROO | | DMD |
| 2737 | UGGCAUUUCU | | mA*RmUmGmGmC*SfA*SfU*SfU*SfU | | OSSSSSS | | |
| | | | *SfC*SfU | | | | |
| WV- | UCAAGGAAGA | 575 | fU*SfC*SfA*SfA*SfG*SfG*SmAmAmG | 1327 | SSSSSSOORRRO | | Exon 51 |
| 2738 | UGGCAUUUCU | | *RmA*RmU*RmGmGmC*SfA*SfU*Sf | | OSSSSSS | | |
| | | | U*SfU*SfC*SfU | | | | |
| WV- | UCAAGGAAGA | 576 | fU*SfC*SfA*SfA*SfG*SfG*SmAmA*R | 1328 | SSSSSSORRRRR | | Exon 51 |
| 2739 | UGGCAUUUCU | | mG*RmA*RmU*RmG*RmGmC*SfA*Sf | | OSSSSSS | | |
| | | | U*SfU*SfU*SfC*SfU | | | | |
| WV- | UCAAGGAAGA | 577 | fU*SfC*SfA*SfA*SfG*SfG*SmA*RmA | 1329 | SSSSSSRROOOR | | Exon 51 |
| 2740 | UGGCAUUUCU | | *RmGmAmUmG*RmG*RmC*SfA*SfU* | | RSSSSSS | | |
| | | | SfU*SfU*SfC*SfU | | | | |
| WV- | UCAAGGAAGA | 578 | fU*SfC*SfA*SfA*SfG*SfG*SmA*RmA | 1330 | SSSSSSROOOOO | | Exon 51 |
| 2741 | UGGCAUUUCU | | mGmAmUmGmG*RmC*SfA*SfU*SfU* | | RSSSSSS | | |
| | | | SfU*SfC*SfU | | | | |
| WV- | UCAAGGAAGA | 579 | fU*SfC*SfA*SfA*SfG*SfG*SmA*SmA* | 1331 | SSSSSSSSOOOSS | | Exon 51 |
| 2742 | UGGCAUUUCU | | SmGmAmUmG*SmG*SmC*SfA*SfU*S | | SSSSSS | | |
| | | | fU*SfU*SfC*SfU | | | | |
| WV- | UCAAGGAAGA | 580 | fU*SfC*SfA*SfA*SfG*SfG*SmA*SmA | 1332 | SSSSSSSOOOOO | | Exon 51 |
| 2743 | UGGCAUUUCU | | mGmAmUmGmG*SmC*SfA*SfU*SfU* | | SSSSSSS | | |
| | | | SfU*SfC*SfU | | | | |
| WV- | UCAAGGAAGA | 581 | fU*SfC*SfA*SfA*SfG*SfG*SmA*SmA* | 1333 | SSSSSSSSSSSSSS | | Exon 51 |
| 2744 | UGGCAUUUCU | | SmG*SmA*SmU*SmG*SmG*SmC*SfA | | SSSSS | | |
| | | | *SfU*SfU*SfU*SfC*SfU | | | | |
| WV- | UCAAGGAAGA | 582 | fU*SfC*SfA*SfA*SfG*SfG*SmAmAmG | 1334 | SSSSSSOOOOSO | | Exon 51 |
| 2745 | UGGCAUUUCU | | mAfU*SmGmG*SfC*SfA*SfU*SfU*SfU | | SSSSSSS | | |
| | | | *SfC*SfU | | | | |
| WV- | UCAAGGAAGA | 583 | fU*SfC*SfA*SfA*SfG*SfG*SmA*RmA | 1335 | SSSSSSRRRRSRS | | Exon 51 |
| 2746 | UGGCAUUUCU | | *RmG*RmA*RfU*SmG*RmG*SfC*SfA | | SSSSSS | | |
| | | | *SfU*SfU*SfU*SfC*SfU | | | | |
| WV- | UCAAGGAAGA | 584 | fU*SfC*SfA*SfA*SmG*SmG*SfAfAmG | 1336 | SSSSSSOOOOSO | | Exon 51 |
| 2747 | UGGCAUUUCU | | mAfU*SmGmG*SfC*SfA*SfU*SfU*SfU | | SSSSSSS | | |
| | | | *SfC*SfU | | | | |
| WV- | UCAAGGAAGA | 585 | fU*SfC*SfA*SfA*SmG*SmG*SfA*RfA | 1337 | SSSSSSRRRRSRS | | Exon 51 |
| 2748 | UGGCAUUUCU | | *RmG*RmA*RfU*SmG*RmG*SfC*SfA | | SSSSSS | | |
| | | | *SfU*SfU*SfU*SfC*SfU | | | | |
| WV- | UCAAGGAAGA | 586 | fU*SfC*SfA*SfA*SfG*SfG*SfA*SmAm | 1338 | SSSSSSSOOOOO | | Exon 51 |
| 2749 | UGGCAUUUCU | | GmAmUmGmG*SfC*SfA*SfU*SfU*Sf | | SSSSSSS | | |
| | | | U*SfC*SfU | | | | |
| WV- | UCAAGGAAGA | 587 | fU*SfC*SfA*SfA*SfG*SfG*SfA*SmA* | 1339 | SSSSSSSRRRRRS | | Exon 51 |
| 2750 | UGGCAUUUCU | | RmG*RmA*RmU*RmG*RmG*SfC*SfA | | SSSSSS | | |
| | | | *SfU*SfU*SfU*SfC*SfU | | | | |
| WV- | UCAAGGAAGA | 588 | mU*SmC*SmA*SfA*SfG*SfG*SmA*R | 1340 | SSSSSSRRRRRR | | Exon 51 |
| 2791 | UGGCAUUUCU | | mA*RmG*RmA*RmU*RmG*RmG*Rm | | RSSSSSS | | |
| | | | C*SfA*SfU*SfU*SmU*SmC*SmU | | | | |
| WV- | UCAAGGAAGA | 589 | mU*SmC*SmA*SfA*SfG*SfG*SfA*Sm | 1341 | SSSSSSSRRRRRS | | Exon 51 |
| 2792 | UGGCAUUUCU | | A*RmG*RmA*RmU*RmG*RmG*SfC*S | | SSSSSS | | |
| | | | fA*SfU*SfU*SmU*SmC*SmU | | | | |
| WV- | UCAAGGAAGA | 590 | mU*SmC*SmA*SfA*SfG*SfG*SfA*SfA | 1342 | SSSSSSSSRRRSS | | Exon 51 |
| 2793 | UGGCAUUUCU | | *SmG*RmA*RmU*RmG*SfG*SfC*SfA | | SSSSSS | | |
| | | | *SfU*SfU*SmU*SmC*SmU | | | | |
| WV- | UCAAGGAAGA | 591 | mU*SmC*SmA*SfA*SfG*SfG*SfA*SfA | 1343 | SSSSSSSSSRSSS | | Exon 51 |
| 2794 | UGGCAUUUCU | | *SfG*SmA*RmU*SfG*SfG*SfC*SfA*Sf | | SSSSSS | | |
| | | | U*SfU*SmU*SmC*SmU | | | | |
| WV- | UCAAGGAAGA | 592 | mU*SmC*SmA*SfA*SfG*SfG*SfA*SfA | 1344 | SSSSSSSSOOOSS | | Exon 51 |
| 2795 | UGGCAUUUCU | | *SmGmAmUmG*SfG*SfC*SfA*SfU*Sf | | SSSSSS | | |
| | | | U*SmU*SmC*SmU | | | | |
| WV- | UCAAGGAAGA | 593 | mU*SmC*SmA*SfA*SfG*SfG*SfA*SfA | 1345 | SSSSSSSSSOSSS | | Exon 51 |
| 2796 | UGGCAUUUCU | | *SfG*SmAmU*SfG*SfG*SfC*SfA*SfU* | | SSSSSS | | |
| | | | SfU*SmU*SmC*SmU | | | | |
| WV- | UCAAGGAAGA | 594 | fU*fC*fA*fA*fG*fG*fA*fA*mG*mA*m | 1346 | XXXXXXXXXX | randomer based on WV- | DMD |
| 2797 | UGGCAUUUCU | | U*mG*mG*fC*fA*fU*fU*fU*fC*fU | | XXXXXXXXX | 2526 | |
| WV- | UCAAGGAAGA | 595 | fU*fC*fA*fA*fG*fG*fA*fA*mG*mA*m | 1347 | XXXXXXXXXX | randomer based on WV- | DMD |
| 2798 | UGGCAUUUCU | | U*mG*fG*fC*fA*fU*fU*fU*fC*fU | | XXXXXXXXX | 2527 | |
| WV- | UCAAGGAAGA | 596 | fU*fC*fA*fA*fG*fG*fA*fA*fG*mA*m | 1348 | XXXXXXXXXX | randomer based on WV- | DMD |
| 2799 | UGGCAUUUCU | | U*fG*fG*fC*fA*fU*fU*fU*fC*fU | | XXXXXXXXX | 2528 | |
| WV- | UCAAGGAAGA | 597 | fU*fC*fA*fA*fG*fG*fA*mA*mG*mA* | 1349 | XXXXXXXXXX | randomer based on WV- | DMD |
| 2800 | UGGCAUUUCU | | mU*mG*mG*fC*fA*fU*fU*fU*fC*fU | | XXXXXXXXX | 2750 | |
| WV- | UCAAGGAAGA | 598 | mU*mC*mA*fA*fG*fG*mA*mA*mG* | 1350 | XXXXXXXXXX | randomer based on WV- | DMD |
| 2801 | UGGCAUUUCU | | mA*mU*mG*mG*mC*fA*fU*fU*mU* | | XXXXXXXXX | 2791 | |
| | | | mC*mU | | | | |
| WV- | UCAAGGAAGA | 599 | mU*mC*mA*fA*fG*fG*fA*mA*mG*m | 1351 | XXXXXXXXXX | randomer based on WV- | DMD |
| 2802 | UGGCAUUUCU | | A*mU*mG*mG*fC*fA*fU*fU*mU*mC | | XXXXXXXXX | 2792 | |
| | | | *mU | | | | |
| WV- | UCAAGGAAGA | 600 | mU*mC*mA*fA*fG*fG*fA*fA*mG*m | 1352 | XXXXXXXXXX | randomer based on WV- | DMD |
| 2803 | UGGCAUUUCU | | A*mU*mG*fG*fC*fA*fU*fU*mU*mC* | | XXXXXXXXX | 2793 | |
| | | | mU | | | | |
| WV- | UCAAGGAAGA | 601 | mU*mC*mA*fA*fG*fG*fA*fA*fG*mA | 1353 | XXXXXXXXXX | randomer based on WV- | DMD |
| 2804 | UGGCAUUUCU | | *mU*fG*fG*fC*fA*fU*fU*mU*mC*mU | | XXXXXXXXX | 2794 | |
| WV- | UCAAGGAAGA | 602 | mU*mC*mA*fA*fG*fG*fA*fA*mGmA | 1354 | XXXXXXXXOO | randomer based on WV- | DMD |
| 2805 | UGGCAUUUCU | | mUmG*fG*fC*fA*fU*fU*mU*mC*mU | | OXXXXXXXX | 2795 | |
| WV- | UCAAGGAAGA | 603 | mU*mC*mA*fA*fG*fG*fA*fA*fG*mA | 1355 | XXXXXXXXXO | randomer based on WV- | DMD |
| 2806 | UGGCAUUUCU | | mU*fG*fG*fC*fA*fU*fU*mU*mC*mU | | XXXXXXXXX | 2796 | |
| WV- | UCAAGGAAGA | 604 | Mod024L001*mU*mC*mA*mA*mG*m | 1356 | XXXXXXXXXX | All-OMe full-PS | Exon 51 |
| 2807 | UGGCAUUUCU | | G*mA*mA*mG*mA*mU*mG*mG*mC* | | XXXXXXXXXX | TriGlcNAc conjugated | |
| | | | mA*mU*mU*mU*mC*mU | | | WV942 C6 PS | |
| WV- | UCAAGGAAGA | 605 | Mod026L001*mU*mC*mA*mA*mG*m | 1357 | XXXXXXXXXX | All-OMe full-PS | Exon 51 |
| 2808 | UGGCAUUUCU | | G*mA*mA*mG*mA*mU*mG*mG*mC* | | XXXXXXXXXX | TrialphaMannose | |
| | | | mA*mU*mU*mU*mC*mU | | | conjugated WV942 C6 | |
| | | | | | | PS | |
| WV- | UCAAGGAAGA | 606 | fU*fC*fA*fA*fG*fG*mA*mA*mG*mA | 1358 | XXXXXXXXXX | WV-1714 based BrdU in | DMD |
| 2812 | TGGCAUUUCU | | *BrdU*mG*mG*mC*fA*fU*fU*fU*fC* | | XXXXXXXXX | the center | exon 51 |
| | | | fU | | | | |
| WV- | UCAAGGAAGA | 607 | fU*fC*fA*fA*fG*fG*fA*fA*fG*mA*Br | 1359 | XXXXXXXXXX | WV-2528 and WV-2799 | DMD |
| 2813 | TGGCAUUUCU | | dU*fG*fG*fC*fA*fU*fU*fU*fC*fU | | XXXXXXXXX | based randomer BrdU in | exon 51 |
| | | | | | | the center | |
| WV- | UCAAGGAAGA | 608 | mU*mC*mA*mA*mG*mG*mA*mA*m | 1360 | XXXXXXXXXX | WV-942 based BrdU in | DMD |
| 2814 | TGGCAUUUCU | | G*mA*BrdU*mG*mG*mC*mA*mU*m | | XXXXXXXXX | the center | exon 51 |
| | | | U*mU*mC*mU | | | | |
| WV- | UCAAGGAAGA | 609 | fU*SfC*SfA*SfA*SfG*SfG*SfA*SfA*S | 1361 | SSSSSSSSOOOSS | WV-2530 based, BrdU | Exon 51 |
| 3017 | TGGCAUUUCU | | mGmABrdUmG*SfG*SfC*SfA*SfU*Sf | | SSSSSS | in the middle | |
| | | | U*SfU*SfC*SfU | | | | |
| WV- | UCAAGGAAGA | 610 | fU*fC*fA*fA*fG*fG*fA*fA*mGmABrd | 1362 | XXXXXXXXOO | WV-2530 based, | Exon 51 |
| 3018 | TGGCAUUUCU | | UmG*fG*fC*fA*fU*fU*fU*fC*fU | | OXXXXXXXX | randomer, BrdU in the | |
| | | | | | | middle | |
| WV- | UCAAGGAAGA | 611 | fU*SfC*SfA*SfA*SfG*SfG*SmAmAmG | 1363 | SSSSSSOOOOOO | WV-2438 based, BrdU | Exon 51 |
| 3019 | TGGCAUUUCU | | mABrdUmGmGmC*SfA*SfU*SfU*SfU* | | OSSSSSS | in the middle | |
| | | | SfC*SfU | | | | |
| WV- | UCAAGGAAGA | 612 | fU*fC*fA*fA*fG*fG*mAmAmGmABrd | 1364 | XXXXXXOOOO | WV-2438 based, | Exon 51 |
| 3020 | TGGCAUUUCU | | UmGmGmC*fA*fU*fU*fU*fC*fU | | OOOXXXXXX | randomer, BrdU in the | |
| | | | | | | middle | |
| WV- | UCAAGGAAGA | 613 | L001*fU*SfC*SfA*SfA*SfG*SfG*SmA | 1365 | XSSSSSSOOOOO | WV-2438 based; C6 PS; | DMD |
| 3022 | UGGCAUUUCU | | mAmGmAmUmGmGmC*SfA*SfU*SfU | | OOSSSSSS | on support; used for | |
| | | | *SfU*SfC*SfU | | | conjugation | |
| WV- | UCAAGGAAGA | 614 | Mod015L001*fU*SfC*SfA*SfA*SfG*Sf | 1366 | OXSSSSSSOOOO | WV-2438 based; | DMD |
| 3023 | UGGCAUUUCU | | G*SmAmAmGmAmUmGmGmC*SfA*S | | OOOSSSSSS | conjugate with stearic | |
| | | | fU*SfU*SfU*SfC*SfU | | | acid C6 PS | |
| WV- | UCAAGGAAGA | 615 | Mod006L001*fU*SfC*SfA*SfA*SfG*Sf | 1367 | OXSSSSSSOOOO | WV-2438 based; | DMD |
| 3024 | UGGCAUUUCU | | G*SmAmAmGmAmUmGmGmC*SfA*S | | OOOSSSSSS | conjugate with DHA C6 | |
| | | | fU*SfU*SfU*SfC*SfU | | | PS | |
| WV- | UCAAGGAAGA | 616 | L001*fU*SfC*SfA*SfA*SfG*SfG*SfA* | 1368 | XSSSSSSSSOOO | WV-2530 based; C6 PS; | DMD |
| 3025 | UGGCAUUUCU | | SfA*SmGmAmUmG*SfG*SfC*SfA*SfU | | SSSSSSSS | on support; used for | |
| | | | *SfU*SfU*SfC*SfU | | | conjugation | |
| WV- | UCAAGGAAGA | 617 | Mod015L001*fU*SfC*SfA*SfA*SfG*Sf | 1369 | OXSSSSSSSSOO | WV-2530 based; | DMD |
| 3026 | UGGCAUUUCU | | G*SfA*SfA*SmGmAmUmG*SfG*SfC* | | OSSSSSSSS | conjugate with stearic | |
| | | | SfA*SfU*SfU*SfU*SfC*SfU | | | acid C6 PS | |
| WV- | UCAAGGAAGA | 618 | Mod006L001*fU*SfC*SfA*SfA*SfG*Sf | 1370 | OXSSSSSSSSOO | WV-2530 based; | DMD |
| 3027 | UGGCAUUUCU | | G*SfA*SfA*SmGmAmUmG*SfG*SfC* | | OSSSSSSSS | conjugate with DHA C6 | |
| | | | SfA*SfU*SfU*SfU*SfC*SfU | | | PS | |
| WV- | UCAAGGAAGA | 619 | fU*SfC*SfA*SfA*SfG*SfG*SfA*SfA*S | 1371 | SSSSSSSSOOOO | WV-2529 based, convert | DMD |
| 3028 | UGGCAUUUCU | | mGmAmUmGmG*SfC*SfA*SfU*SfU*S | | SSSSSSS | PO between 8th and 9th | |
| | | | fU*SfC*SfU | | | nt to PS | |
| WV- | UCAAGGAAGA | 620 | L001*fU*fC*fA*fA*fG*fG*mA*mA*m | 1372 | XXXXXXXXXX | WV-1714 based; | DMD |
| 3029 | UGGCAUUUCU | | G*mA*mU*mG*mG*mC*fA*fU*fU*fU | | XXXXXXXXXX | stereorandom; C6 PS; on | |
| | | | *fC*fU | | | support | |
| WV- | UCAAGGAAGA | 621 | Mod015L001*fU*fC*fA*fA*fG*fG*mA | 1373 | OXXXXXXXXX | WV-1714 based; | DMD |
| 3030 | UGGCAUUUCU | | *mA*mG*mA*mU*mG*mG*mC*fA*fU | | XXXXXXXXXXX | stereorandom; conjugate | |
| | | | *fU*fU*fC*fU | | | with stearic acid C6 PS | |
| WV- | UCAAGGAAGA | 622 | Mod006L001*f1J*fC*fA*fA*fG*fG*mA | 1374 | OXXXXXXXXX | WV-1714 based; | DMD |
| 3031 | UGGCAUUUCU | | *mA*mG*mA*mU*mG*mG*mC*fA*fU | | XXXXXXXXXXX | stereorandom; conjugate | |
| | | | *fU*fU*fC*fU | | | with DHA C6 PS | |
| WV- | UCAAGGAAGA | 623 | Mod020L001*fU*fC*fA*fA*fG*fG*mA | 1375 | OXXXXXXXXX | WV-1714 based; | DMD |
| 3032 | UGGCAUUUCU | | *mA*mG*mA*mU*mG*mG*mC*fA*fU | | XXXXXXXXXXX | stereorandom; conjugate | |
| | | | *fU*fU*fC*fU | | | with turbinaric acid C6 | |
| | | | | | | PS | |
| WV- | UCAAGGAAGA | 624 | Mod019L001*fU*fC*fA*fA*fG*fG*mA | 1376 | OXXXXXXXXX | WV-1714 based; | DMD |
| 3033 | UGGCAUUUCU | | *mA*mG*mA*mU*mG*mG*mC*fA*fU | | XXXXXXXXXXX | stereorandom; conjugate | |
| | | | *fU*fU*fC*fU | | | with gamma-Linolenic | |
| | | | | | | acid C6 PS | |
| WV- | UCAAGGAAGA | 625 | L001*fU*fC*fA*fA*fG*fG*fA*fA*mG | 1377 | XXXXXXXXXO | WV-2530 based; | DMD |
| 3034 | UGGCAUUUCU | | mAmUmG*fG*fC*fA*fU*fU*fU*fC*fU | | OOXXXXXXXX | stereorandom; C6 PS; on | |
| | | | | | | support | |
| WV- | UCAAGGAAGA | 626 | Mod015L001*fU*fC*fA*fA*fG*fG*fA*f | 1378 | OXXXXXXXXX | WV-2530 based; | DMD |
| 3035 | UGGCAUUUCU | | A*mGmAmUmG*fG*fC*fA*fU*fU*fU* | | OOOXXXXXXXX | stereorandom; conjugate | |
| | | | fC*fU | | | with stearic acid C6 PS | |
| WV- | UCAAGGAAGA | 627 | Mod006L001*fU*fC*fA*fA*fG*fG*fA*f | 1379 | OXXXXXXXXX | WV-2530 based; | DMD |
| 3036 | UGGCAUUUCU | | A*mGmAmUmG*fG*fC*fA*fU*fU*fU* | | OOOXXXXXXXX | stereorandom; conjugate | |
| | | | fC*fU | | | with DHA C6 PS | |
| WV- | UCAAGGAAGA | 628 | Mod020L001*fU*fC*fA*fA*fG*fG*fA*f | 1380 | OXXXXXXXXX | WV-2530 based; | DMD |
| 3037 | UGGCAUUUCU | | A*mGmAmUmG*fG*fC*fA*fU*fU*fU* | | OOOXXXXXXXX | stereorandom; conjugate | |
| | | | fC*fU | | | with turbinaric acid C6 | |
| | | | | | | PS | |
| WV- | UCAAGGAAGA | 629 | Mod019L001*fU*fC*fA*fA*fG*fG*fA*f | 1381 | OXXXXXXXXX | WV-2530 based; | DMD |
| 3038 | UGGCAUUUCU | | A*mGmAmUmG*fG*fC*fA*fU*fU*fU* | | OOOXXXXXXXX | stereorandom; conjugate | |
| | | | fC*fU | | | with gamma-Linolenic | |
| | | | | | | acid C6 PS | |
| WV- | UCAAGGAAGA | 630 | fU*fC*fA*fA*fG*fG*mAmAmGmA*m | 1382 | XXXXXXOOOX | Randomer of WV-2737; | DMD |
| 3039 | UGGCAUUUCU | | UmGmGmC*fA*fU*fU*fU*fC*fU | | OOOXXXXXX | based on WV-2438; with | exon 51 |
| | | | | | | Rp/PO in the core | |
| WV- | UCAAGGAAGA | 631 | fU*fC*fA*fA*fG*fG*mAmAmG*mA*m | 1383 | XXXXXXOOXX | Randomer of WV-2738; | DMD |
| 3040 | UGGCAUUUCU | | U*mGmGmC*fA*fU*fU*fU*fC*fU | | XOOXXXXXX | based on WV-2438; with | exon 51 |
| | | | | | | Rp/PO in the core | |
| WV- | UCAAGGAAGA | 632 | fU*fC*fA*fA*fG*fG*mAmA*mG*mA* | 1384 | XXXXXXOXXX | Randomer of WV-2739; | DMD |
| 3041 | UGGCAUUUCU | | mU*mG*mGmC*fA*fU*fU*fU*fC*fU | | XXOXXXXXX | based on WV-2438; with | exon 51 |
| | | | | | | Rp/PO in the core | |
| WV- | UCAAGGAAGA | 633 | fU*fC*fA*fA*fG*fG*mA*mA*mGmAm | 1385 | XXXXXXXXOO | Randomer of WV-2740; | DMD |
| 3042 | UGGCAUUUCU | | UmG*mG*mC*fA*fU*fU*fU*fC*fU | | OXXXXXXXX | based on WV-2438; with | exon 51 |
| | | | | | | Rp/PO in the core | |
| WV- | UCAAGGAAGA | 634 | fU*fC*fA*fA*fG*fG*mA*mAmGmAm | 1386 | XXXXXXXOOO | Randomer of WV-2741; | DMD |
| 3043 | UGGCAUUUCU | | UmGmG*mC*fA*fU*fU*fU*fC*fU | | OOXXXXXXX | based on WV-2438; with | exon 51 |
| | | | | | | Rp/PO in the core | |
| WV- | UCAAGGAAGA | 635 | fU*fC*fA*fA*fG*fG*mA*mA*mGmAm | 1387 | XXXXXXXXOO | Randomer of WV-2742; | DMD |
| 3044 | UGGCAUUUCU | | UmG*mG*mC*fA*fU*fU*fU*fC*fU | | OXXXXXXXX | based on WV-2438; with | exon 51 |
| | | | | | | Sp/PO in the core | |
| WV- | UCAAGGAAGA | 636 | fU*fC*fA*fA*fG*fG*mA*mAmGmAm | 1388 | XXXXXXXOOO | Randomer of WV-2743; | DMD |
| 3045 | UGGCAUUUCU | | UmGmG*mC*fA*fU*fU*fU*fC*fU | | OOXXXXXXX | based on WV-2438; with | exon 51 |
| | | | | | | Sp/PO in the core | |
| WV- | UCAAGGAAGA | 637 | fU*fC*fA*fA*fG*fG*mAmAmGmAfU* | 1389 | XXXXXXOOOO | Randomer of WV-2745; | DMD |
| 3046 | UGGCAUUUCU | | mGmG*fC*fA*fU*fU*fU*fC*fU | | XOXXXXXXX | based on WV-2444; | exon 51 |
| | | | | | | Sp/PO in the core; with | |
| | | | | | | additional fU fC in the | |
| | | | | | | core | |
| WV- | UCAAGGAAGA | 638 | fU*fC*fA*fA*fG*fG*mA*mA*mG*mA | 1390 | XXXXXXXXXX | Randomer of WV-2746; | DMD |
| 3047 | UGGCAUUUCU | | *fU*mG*mG*fC*fA*fU*fU*fU*fC*fU | | XXXXXXXXX | based on WV-2444; | exon 51 |
| | | | | | | Sp/Rp in the core; with | |
| | | | | | | additional fU fC in the | |
| | | | | | | core | |
| WV- | UCAAGGAAGA | 639 | fU*fC*fA*fA*mG*mG*fAfAmGmAfU* | 1391 | XXXXXXOOOO | Randomer of WV-2747; | DMD |
| 3048 | UGGCAUUUCU | | mGmG*fC*fA*fU*fU*fU*fC*fU | | XOXXXXXXX | based on WV-2444; | exon 51 |
| | | | | | | Sp/PO in the core; with | |
| | | | | | | mGmG on left wing, | |
| | | | | | | with additional fA fA fU | |
| | | | | | | fC in the core | |
| WV- | UCAAGGAAGA | 640 | fU*fC*fA*fA*mG*mG*fA*fA*mG*mA | 1392 | XXXXXXXXXX | Randomer of WV-2748; | DMD |
| 3049 | UGGCAUUUCU | | *fU*mG*mG*fC*fA*fU*fU*fU*fC*fU | | XXXXXXXXX | based on WV-2444; | exon 51 |
| | | | | | | Sp/Rp in the core; with | |
| | | | | | | mGmG on left wing, | |
| | | | | | | with additional fA fA fU | |
| | | | | | | fC in the core | |
| WV- | UCAAGGAAGA | 641 | fU*fC*fA*fA*fG*fG*mA*mA*mG*mA | 1393 | XXXXXXXXXX | All PS version of the | DMD |
| 3050 | UGGCAUUUCU | | *fU*mG*mG*fC*fA*fU*fU*fU*fC*fU | | XXXXXXXXX | randomer of WV- | exon 51 |
| | | | | | | 2745/2746; based on | |
| | | | | | | WV-2444; with | |
| | | | | | | additional fU fC in the | |
| | | | | | | core | |
| WV- | UCAAGGAAGA | 642 | fU*fC*fA*fA*mG*mG*fA*fA*mG*mA | 1394 | XXXXXXXXXX | All PS version of the | DMD |
| 3051 | UGGCAUUUCU | | *fU*mG*mG*fC*fA*fU*fU*fU*fC*fU | | XXXXXXXXX | randomer of WV- | exon 51 |
| | | | | | | 2747/2748; based on | |
| | | | | | | WV-2444; Sp/PO in the | |
| | | | | | | core; with mGmG on | |
| | | | | | | left wing, with | |
| | | | | | | additional fA fA fU fC | |
| | | | | | | in the core | |
| WV- | UCAAGGAAGA | 643 | fU*fC*fA*fA*mG*mG*fA*fA*mGmAm | 1395 | XXXXXXXXOO | Based on WV-2530; | DMD |
| 3052 | UGGCAUUUCU | | UmG*mG*fC*fA*fU*fU*fU*fC*fU | | OXXXXXXXX | replace all 2′F G with | exon 51 |
| | | | | | | 2′Ome G | |
| WV- | UCAAGGAAGA | 644 | fU*fC*fA*fA*mG*mG*mA*mA*mGmA | 1396 | XXXXXXXXOO | Based on WV-2107; | DMD |
| 3053 | UGGCAUUUCU | | fUmG*mG*fC*fA*fU*fU*fU*fC*fU | | OXXXXXXXX | four 2′-F on the 5′; seven | exon 51 |
| | | | | | | 2′-F on the 3′; 2′F U in | |
| | | | | | | the center | |
| WV- | UCAAGGAAGA | 645 | fU*fC*fA*fA*mG*mG*fA*fA*mG*mA | 1397 | XXXXXXXXXX | All PS; based on WV- | DMD |
| 3054 | UGGCAUUUCU | | *mU*mG*mG*fC*fA*fU*fU*fU*fC*fU | | XXXXXXXXX | 2530/2529; replace all | exon 51 |
| | | | | | | 2′F G with 2′Ome G | |
| WV- | UCAAGGAAGA | 646 | fU*fC*fA*fA*mG*mG*mA*mA*mG*m | 1398 | XXXXXXXXXX | All PS; based on WV- | DMD |
| 3055 | UGGCAUUUCU | | A*fU*mG*mG*fC*fA*fU*fU*fU*fC*fU | | XXXXXXXXX | 2107; four 2′-F on the 5′; | exon 51 |
| | | | | | | seven 2′-F on the 3′; 2′F | |
| | | | | | | U in the center | |
| WV- | UCAAGGAAGA | 647 | fU*fC*fA*fA*mG*mG*fAfAmGmA*fU | 1399 | XXXXXXOOOX | Based on WV-2747; | DMD |
| 3056 | UGGCAUUUCU | | *mGmG*fC*fA*fU*fU*fU*fC*fU | | XOXXXXXXX | with additional PS in the | exon 51 |
| | | | | | | center between A and U | |
| WV- | UCAAGGAAGA | 648 | fU*fC*fA*fA*mG*mG*fA*fA*mG*mA | 1400 | XXXXXXXXXX | All PS version; based on | DMD |
| 3057 | UGGCAUUUCU | | *fU*mG*mG*fC*fA*fU*fU*fU*fC*fU | | XXXXXXXXX | WV-2747; with | exon 51 |
| | | | | | | additional PS in the | |
| | | | | | | center between A and U | |
| WV- | UCAAGGAAGA | 649 | fU*fC*fA*fA*mG*mG*fA*fA*mG*fA*f | 1401 | XXXXXXXXXX | Based on WV-1716; | DMD |
| 3058 | UGGCAUUUCU | | U*mG*mG*fC*fA*fU*fU*fU*fC*fU | | XXXXXXXXX | with all mC converted to | exon 51 |
| | | | | | | fC | |
| WV- | UCAAGGAAGA | 650 | fU*fC*fA*fA*mG*mG*fA*fA*mGmAm | 1402 | XXXXXXXXOO | Randomers of based on | DMD |
| 3059 | UGGCAUUUCU | | UmGmG*fC*fA*fU*fU*fU*fC*fU | | OOXXXXXXX | WV-2529; with all G as | exon 51 |
| | | | | | | mG; with additional PS | |
| | | | | | | between A and G | |
| WV- | UCAAGGAAGA | 651 | fU*fC*fA*fA*mG*mG*fA*fA*mGmAf | 1403 | XXXXXXXXOO | Randomer; Sp/PO in the | DMD |
| 3060 | UGGCAUUUCU | | U*mGmG*fC*fA*fU*fU*fU*fC*fU | | XOXXXXXXX | core; with mGmG on | exon 51 |
| | | | | | | left wing, with | |
| | | | | | | additional fA fA fU fC | |
| | | | | | | in the core | |
| WV- | UCAAGGAAGA | 652 | fU*fC*fA*fA*mG*mG*mA*mA*mGmA | 1404 | XXXXXXXXOO | Based on WV-2107; | DMD |
| 3061 | UGGCAUUUCU | | fU*mGmG*fC*fA*fU*fU*fU*fC*fU | | XOXXXXXXX | four 2′-F on the 5′; seven | exon 51 |
| | | | | | | 2′-F on the 3′; 2′F U in | |
| | | | | | | the center | |
| WV- | UCAAGGAAGA | 653 | fU*SfC*SfA*SfA*SfG*SfG*SmAmAmG | 1405 | SSSSSSOOOODO | WV-2438 based, with | Exon 51 |
| 3070 | UGGCAUUUCU | | mAmU:mGmGmC*SfA*SfU*SfU*SfU* | | OSSSSSS | PS2 after nucleotide 11 | |
| | | | SfC*SfU | | | | |
| WV- | UCAAGGAAGA | 654 | fU*SfC*SfA*SfA*SfG*SfG*SmAmA:m | 1406 | SSSSSSODODOD | WV-2438 based, with | Exon 51 |
| 3071 | UGGCAUUUCU | | GmA:mUmG:mGmC*SfA*SfU*SfU*SfU | | OSSSSSS | PS2 after nucleotide 8, | |
| | | | *SfC*SfU | | | 10, 12 | |
| WV- | UCAAGGAAGA | 655 | fU*SfC*SfA*SfA*SfG*SfG*SmA:mAm | 1407 | SSSSSSDODODO | WV-2438 based, with | Exon 51 |
| 3072 | UGGCAUUUCU | | G:mAmU:mGmG:mC*SfA*SfU*SfU*Sf | | DSSSSSS | PS2 after nucleotide 7, | |
| | | | U*SfC*SfU | | | 9, 11, 13 | |
| WV- | UCAAGGAAGA | 656 | fU*SfC*SfA*SfA*SfG*SfG*SmA:mAm | 1408 | SSSSSSDOOODO | WV-2438 based, with | Exon 51 |
| 3073 | UGGCAUUUCU | | GmAmU:mGmG:mC*SfA*SfU*SfU*SfU | | DSSSSSS | PS2 after nucleotide 7, | |
| | | | *SfC*SfU | | | 10, 13 | |
| WV- | UCAAGGAAGA | 657 | fU*SfC*SfA*SfA*fGSG:mAmAmGmA | 1409 | SSSXDDOOOOD | WV-2438 based, with | Exon 51 |
| 3074 | UGGCAUUUCU | | mU:mGmGmC*SfA*SfU*SfU*SfU*SfC | | OOSSSSSS | PS2 after nucleotide 11; | |
| | | | *SfU | | | two SfG * on 5′ wing | |
| | | | | | | converted to fG-PS2 | |
| WV- | UCAAGGAAGA | 658 | fU*SfC*SfA*SfA*mG:mG:mAmAmGm | 1410 | SSSXDDOOOOD | WV-2438 based, with | Exon 51 |
| 3075 | UGGCAUUUCU | | AmU:mGmGmC*SfA*SfU*SfU*SfU*Sf | | OOSSSSSS | PS2 after nucleotide 11; | |
| | | | C*SfU | | | two SfG * on 5′ wing | |
| | | | | | | converted to mG-PS2 | |
| WV- | UCAAGGAAGA | 659 | fU*SfC*SfA*SfA*SfG*SfG*SfA*SmAm | 1411 | SSSSSSSOOODO | WV-2749 based, with | Exon 51 |
| 3076 | UGGCAUUUCU | | GmAmU:mGmG*SfC*SfA*SfU*SfU*Sf | | SSSSSSS | PS2 after nucleotide 11 | |
| | | | U*SfC*SfU | | | | |
| WV- | UCAAGGAAGA | 660 | fU*SfC*SfA*SfA*fG:fG:fA*SmAmGmA | 1412 | SSSXDDSOOOD | WV-2749 based, with | Exon 51 |
| 3077 | UGGCAUUUCU | | mU:mGmG*SfC*SfA*SfU*SfU*SfU*Sf | | OSSSSSSS | PS2 after nucleotide 11; | |
| | | | C*SfU | | | two SfG * on 5′ wing | |
| | | | | | | converted to fG-PS2 | |
| WV- | UCAAGGAAGA | 661 | fU*SfC*SfA*SfA*mG:mG:fA*SmAmG | 1413 | SSSXDDSOOOD | WV-2749 based, with | Exon 51 |
| 3078 | UGGCAUUUCU | | mAmU:mGmG*SfC*SfA*SfU*SfU*SfU | | OSSSSSSS | PS2 after nucleotide 11; | |
| | | | *SfC*SfU | | | two SfG * on 5′ wing | |
| | | | | | | converted to mG-PS2 | |
| WV- | UCAAGGAAGA | 662 | fU*SfC*SfA*SfA*SfG*SfG*SfA*SfA*S | 1414 | SSSSSSSSOODSS | WV-2530 based, with | Exon 51 |
| 3079 | UGGCAUUUCU | | mGmAmU:mG*SfG*SfC*SfA*SfU*SfU | | SSSSSS | PS2 after nucleotide 11 | |
| | | | *SfU*SfC*SfU | | | | |
| WV- | UCAAGGAAGA | 663 | fU*SfC*SfA*SfA*SfG*SfG*SfA*SfA*S | 1415 | SSSSSSSSDDDSS | WV-2530 based, with | Exon 51 |
| 3080 | UGGCAUUUCU | | mG:mA:mU:mG*SfG*SfC*SfA*SfU*Sf | | SSSSSS | PS2 after nucleotide 9, | |
| | | | U*SfU*SfC*SfU | | | 10, 11 | |
| WV- | UCAAGGAAGA | 664 | fU*SfC*SfA*SfA*SfG*SfG*SfA*SfA*S | 1416 | SSSSSSSSDODSS | WV-2530 based, with | Exon 51 |
| 3081 | UGGCAUUUCU | | mG:mAmU:mG*SfG*SfC*SfA*SfU*SfU | | SSSSSS | PS2 after nucleotide 9, | |
| | | | *SfU*SfC*SfU | | | 11 | |
| WV- | UCAAGGAAGA | 665 | fU*SfC*SfA*SfA*fG:fG:fA*SfA*SmGm | 1417 | SSSXDDSSOODS | WV-2530 based, with | Exon 51 |
| 3082 | UGGCAUUUCU | | AmU:mG*SfG*SfC*SfA*SfU*SfU*SfU* | | SSSSSSS | PS2 after nucleotide 11; | |
| | | | SfC*SfU | | | two SfG * on 5′ wing | |
| | | | | | | converted to fG-PS2 | |
| WV- | UCAAGGAAGA | 666 | fU*SfC*SfA*SfA*mG:mG:fA*SfA*SmG | 1418 | SSSXDDSSOODS | WV-2530 based, with | Exon 51 |
| 3083 | UGGCAUUUCU | | mAmU:mG*SfG*SfC*SfA*SfU*SfU*Sf | | SSSSSSS | PS2 after nucleotide 11; | |
| | | | U*SfC*SfU | | | two SfG * on 5′ wing | |
| | | | | | | converted to mG-PS2 | |
| WV- | UCAAGGAAGA | 667 | Mod015L001mU*mC*mA*mA*mG*mG | 1419 | OOXXXXXXXX | WV942 with C6 PO and | Exon 51 |
| 3084 | UGGCAUUUCU | | *mA*mA*mG*mA*mU*mG*mG*mC* | | XXXXXXXXXXX | Stearic | |
| | | | mA*mU*mU*mU*mC*mU | | | | |
| WV- | UCAAGGAAGA | 668 | Mod019L001mU*mC*mA*mA*mG*mG | 1420 | OOXXXXXXXX | WV942 with C6 PO and | Exon 51 |
| 3085 | UGGCAUUUCU | | *mA*mA*mG*mA*mU*mG*mG*mC* | | XXXXXXXXXXX | gamma-Linolenic | |
| | | | mA*mU*mU*mU*mC*mU | | | | |
| WV- | UCAAGGAAGA | 669 | Mod020L001mU*mC*mA*mA*mG*mG | 1421 | OOXXXXXXXX | WV942 with C6 PO and | Exon 51 |
| 3086 | UGGCAUUUCU | | *mA*mA*mG*mA*mU*mG*mG*mC* | | XXXXXXXXXXX | Turbinaric | |
| | | | mA*mU*mU*mU*mC*mU | | | | |
| WV- | UCAAGGAAGA | 670 | Mod015L001:mU*mC*mA*mA*mG*m | 1422 | ODXXXXXXXX | WV942 with C6 PS2 | Exon 51 |
| 3087 | UGGCAUUUCU | | G*mA*mA*mG*mA*mU*mG*mG*mC* | | XXXXXXXXXXX | and Stearic | |
| | | | mA*mU*mU*mU*mC*mU | | | | |
| WV- | UCAAGGAAGA | 671 | Mod019L001:mU*mC*mA*mA*mG*m | 1423 | ODXXXXXXXX | WV942 with C6 PS2 | Exon 51 |
| 3088 | UGGCAUUUCU | | G*mA*mA*mG*mA*mU*mG*mG*mC* | | XXXXXXXXXXX | and gamma-Linolenic | |
| | | | mA*mU*mU*mU*mC*mU | | | | |
| WV- | UCAAGGAAGA | 672 | Mod020L001:mU*mC*mA*mA*mG*m | 1424 | ODXXXXXXXX | WV942 with C6 PS2 | Exon 51 |
| 3089 | UGGCAUUUCU | | G*mA*mA*mG*mA*mU*mG*mG*mC* | | XXXXXXXXXXX | and Turbinaric | |
| | | | mA*mU*mU*mU*mC*mU | | | | |
| WV- | UCAAGGAAGA | 673 | fU*SfC*SfA*SfA*SfG:fG:mAmAmGmA | 1425 | SSSSDDOOOOD | Variant of WV-3074. | Exon 51 |
| 3113 | UGGCAUUUCU | | mU:mGmGmC*SfA*SfU*SfU*SfU*SfC | | OOSSSSSS | There was a randomer | |
| | | | *SfU | | | PS in WV-3074 | |
| WV- | UCAAGGAAGA | 674 | fU*SfC*SfA*SfA*SmG:mG:mAmAmG | 1426 | SSSSDDOOOOD | Variant of WV-3075. | Exon 51 |
| 3114 | UGGCAUUUCU | | mAmU:mGmGmC*SfA*SfU*SfU*SfU* | | OOSSSSSS | There was a randomer | |
| | | | SfC*SfU | | | PS in WV-3075 | |
| WV- | UCAAGGAAGA | 675 | fU*SfC*SfA*SfA*SfG:fG:fA*SmAmGm | 1427 | SSSSDDSOOOD | Variant of WV-3077. | Exon 51 |
| 3115 | UGGCAUUUCU | | AmU:mGmG*SfC*SfA*SfU*SfU*SfU*S | | OSSSSSSS | There was a randomer | |
| | | | fC*SfU | | | PS in WV-3077 | |
| WV- | UCAAGGAAGA | 676 | fU*SfC*SfA*SfA*SmG:mG:fA*SmAmG | 1428 | SSSSDDSOOOD | Variant of WV-3078. | Exon 51 |
| 3116 | UGGCAUUUCU | | mAmU:mGmG*SfC*SfA*SfU*SfU*SfU | | OSSSSSSS | There was a randomer | |
| | | | *SfC*SfU | | | PS in WV-3078 | |
| WV- | UCAAGGAAGA | 677 | fU*SfC*SfA*SfA*SfG:fG:fA*SfA*SmG | 1429 | SSSSDDSSOODS | Variant of WV-3082. | Exon 51 |
| 3117 | UGGCAUUUCU | | mAmU:mG*SfG*SfC*SfA*SfU*SfU*Sf | | SSSSSSS | There was a randomer | |
| | | | U*SfC*SfU | | | PS in WV-3082 | |
| WV- | UCAAGGAAGA | 678 | fU*SfC*SfA*SfA*SmG:mG:fA*SfA*Sm | 1430 | SSSSDDSSOODS | Variant of WV-3083. | Exon 51 |
| 3118 | UGGCAUUUCU | | GmAmU:mG*SfG*SfC*SfA*SfU*SfU*S | | SSSSSSS | There was a randomer | |
| | | | fU*SfC*SfU | | | PS in WV-3083 | |
| WV- | UCAAGGAAGA | 679 | fU*SfC*SfA*SfA*SfG*SfG*SfA*SfA*Sf | 1431 | SSSSSSSSSOOSS | 9F-3OMe-8F 9Sp-2PO- | Exon 51 |
| 3120 | UGGCAUUUCU | | G*SmAmUmG*SfG*SfC*SfA*SfU*SfU | | SSSSSS | 8Sp | |
| | | | *SfU*SfC*SfU | | | | |
| WV- | UCAAGGAAGA | 680 | fU*fC*fA*fA*fG*fG*fA*fA*fG*mAmU | 1432 | XXXXXXXXXO | 9F-3OMe-8F 9PS-2PO- | Exon 51 |
| 3121 | UGGCAUUUCU | | mG*fG*fC*fA*fU*fU*fU*fC*fU | | OXXXXXXXX | 8PS, randomer version | |
| | | | | | | of WV-3120 | |
| WV- | UCAAGGAAGA | 681 | fU*SfC*SfA*SfA*SfG*SfG*SmAfA*Sm | 1433 | SSSSSSOSOSOS | WV-2438 modifed | DMD |
| 3152 | UGGCAUUUCU | | GfA*SmUfG*SmGfC*SfA*SfU*SfU*Sf | | OSSSSSS | | |
| | | | U*SfC*SfU | | | | |
| WV- | UCAAGGAAGA | 682 | fU*SfC*SfA*SfA*SfG*SfG*SfA*SfA*S | 1434 | SSSSSSSSOSOSS | WV-2529 modified | DMD |
| 3153 | UGGCAUUUCU | | mGfA*SmUfG*SmG*SfC*SfA*SfU*SfU | | SSSSSS | | |
| | | | *SfU*SfC*SfU | | | | |
| WV- | UCAAGGAAGA | 683 | L001mU*mC*mA*mA*mG*mG*mA*m | 1435 | OXXXXXXXXX | WV942 with C6 PO | Exon 51 |
| 3357 | UGGCAUUUCU | | A*mG*mA*mU*mG*mG*mC*mA*mU* | | XXXXXXXXXX | linker | |
| | | | mU*mU*mC*mU | | | | |
| WV- | UCAAGGAAGA | 684 | L001fU*SfC*SfA*SfA*SfG*SfG*SfA*Sf | 1436 | OSSSSSSSSSOSS | WV2531 with C6 PO | Exon 51 |
| 3358 | UGGCAUUUCU | | A*SfG*SmAmU*SfG*SfG*SfC*SfA*Sf | | SSSSSSS | linker | |
| | | | U*SfU*SfU*SfC*SfU | | | | |
| WV- | UCAAGGAAGA | 685 | Mod013L001mU*mC*mA *mA*mG*mG | 1437 | OOXXXXXXXX | WV942 with C6 amine | Exon 51 |
| 3359 | UGGCAUUUCU | | *mA*mA*mG*mA*mU*mG*mG*mC* | | XXXXXXXXXXX | PO linker, Lauric acid | |
| | | | mA*mU*mU*mU*mC*mU | | | | |
| WV- | UCAAGGAAGA | 686 | Mod013L001fU*SfC*SfA*SfA*SfG*SfG | 1438 | OOSSSSSSSSSOS | WV2531 with C6 amine | Exon 51 |
| 3360 | UGGCAUUUCU | | *SfA*SfA*SfG*SmAmU*SfG*SfG*SfC* | | SSSSSSSS | PO linker, Lauric acid | |
| | | | SfA*SfU*SfU*SfU*SfC*SfU | | | | |
| WV- | UCAAGGAAGA | 687 | Mod014L001fU*SfC*SfA*SfA*SfG*SfG | 1439 | OOSSSSSSSSSOS | WV2531 with C6 amine | Exon 51 |
| 3361 | UGGCAUUUCU | | *SfA*SfA*SfG*SmAmU*SfG*SfG*SfC* | | SSSSSSSS | PO linker, Myristic acid | |
| | | | SfA*SfU*SfU*SfU*SfC*SfU | | | | |
| WV- | UCAAGGAAGA | 688 | Mod005L001fU*SfC*SfA*SfA*SfG*SfG | 1440 | OOSSSSSSSSSOS | WV2531 with C6 amine | Exon 51 |
| 3362 | UGGCAUUUCU | | *SfA*SfA*SfG*SmAmU*SfG*SfG*SfC* | | SSSSSSSS | PO linker, Palmitic acid | |
| | | | SfA*SfU*SfU*SfU*SfC*SfU | | | | |
| WV- | UCAAGGAAGA | 689 | Mod015L001fU*SfC*SfA*SfA*SfG*SfG | 1441 | OOSSSSSSSSSOS | WV2531 with C6 amine | Exon 51 |
| 3363 | UGGCAUUUCU | | *SfA*SfA*SfG*SmAmU*SfG*SfG*SfC* | | SSSSSSSS | PO linker, Stearic acid | |
| | | | SfA*SfU*SfU*SfU*SfC*SfU | | | | |
| WV- | UCAAGGAAGA | 690 | Mod020L001fU*SfC*SfA*SfA*SfG*SfG | 1442 | OOSSSSSSSSSOS | WV2531 with C6 amine | Exon 51 |
| 3364 | UGGCAUUUCU | | *SfA*SfA*SfG*SmAmU*SfG*SfG*SfC* | | SSSSSSSS | PO linker, Turbinaric | |
| | | | SfA*SfU*SfU*SfU*SfC*SfU | | | acid | |
| WV- | UCAAGGAAGA | 691 | Mod027L001fU*SfC*SfA*SfA*SfG*SfG | 1443 | OSSSSSSSSSOSS | WV2531 with C6 amine | Exon 51 |
| 3365 | UGGCAUUUCU | | *SfA*SfA*SfG*SmAmU*SfG*SfG*SfC* | | SSSSSSS | PO linker, | |
| | | | SfA*SfU*SfU*SfU*SfC*SfU | | | MonoSulfonamide | |
| WV- | UCAAGGAAGA | 692 | Mod029L001fU*SfC*SfA*SfA*SfG*SfG | 1444 | OSSSSSSSSSOSS | WV2531 with C6 amine | Exon 51 |
| 3366 | UGGCAUUUCU | | *SfA*SfA*SfG*SmAmU*SfG*SfG*SfC* | | SSSSSSS | PO linker, | |
| | | | SfA*SfU*SfU*SfU*SfC*SfU | | | TriSulfonamide | |
| WV- | UCAAGGAAGA | 693 | fU*SfC*SfA*SfA*SfG*SfGfA*SmAfG* | 1445 | SSSSSOSOSOSO | modifying WV-3152, | Exon 51 |
| 3463 | UGGCAUUUCU | | SmAfU*SmGfGfC*SfA*SfU*SfU*SfU* | | OSSSSSS | 2′f-U and Sp in the | |
| | | | SfC*SfU | | | middle | |
| WV- | UCAAGGAAGA | 694 | fU*SfC*SfA*SfA*SfG*SfG*SfA*SfAfG | 1446 | SSSSSSSOSOSSS | modifying WV-3153, | Exon 51 |
| 3464 | UGGCAUUUCU | | *SmAfU*SmG*SmG*SfC*SfA*SfU*SfU | | SSSSSS | 2′f-U and Sp in the | |
| | | | *SfU*SfC*SfU | | | middle | |
| WV- | UCAAGGAAGA | 695 | fU*SfC*SfA*SfA*SfG*SfG*SfA*SfA*Sf | 1447 | SSSSSSSSSOSSS | modifying WV-2531, | Exon 51 |
| 3465 | UGGCAUUUCU | | G*SmAfU*SmG*SfG*SfC*SfA*SfU*Sf | | SSSSSS | 2′f-U and Sp in the | |
| | | | U*SfU*SfC*SfU | | | middle | |
| WV- | UCAAGGAAGA | 696 | fU*SfC*SfA*SfA*SfG*SfG*SfA*SfA*S | 1448 | SSSSSSSSOOSOS | modifying WV-3028, | Exon 51 |
| 3466 | UGGCAUUUCU | | mGmAfU*SmGmG*SfC*SfA*SfU*SfU* | | SSSSSS | 2′f-U and Sp in the | |
| | | | SfU*SfC*SfU | | | middle | |
| WV- | UCAAGGAAGA | 697 | fU*SfC*SfA*SfA*SfG*SfG*SfA*SfA*Sf | 1449 | SSSSSSSSSOSOS | modifying WV-3120, | Exon 51 |
| 3467 | UGGCAUUUCU | | G*SmAfU*SmGfG*SfC*SfA*SfU*SfU* | | SSSSSS | 2′f-U and Sp in the | |
| | | | SfU*SfC*SfU | | | middle | |
| WV- | UCAAGGAAGA | 698 | fU*SfC*SfA*SfA*SfG*SfG*mAmAmG | 1450 | SSSSSXOOOOSO | modifying WV-3046, | Exon 51 |
| 3468 | UGGCAUUUCU | | mAfU*SmGmG*SfC*SfA*SfU*SfU*SfU | | SSSSSSS | 2′f-U and Sp in the | |
| | | | *SfC*SfU | | | middle | |
| WV- | UCAAGGAAGA | 699 | fU*SfC*SfA*SfA*SfG*SfG*SmA*SmA* | 1451 | SSSSSSSSSSSSSS | modifying WV-3047, | Exon 51 |
| 3469 | UGGCAUUUCU | | SmG*SmA*SfU*SmG*SmG*SfC*SfA*S | | SSSSS | 2′f-U and Sp in the | |
| | | | fU*SfU*SfU*SfC*SfU | | | middle | |
| WV- | UCAAGGAAGA | 700 | fU*SfC*SfA*SfA*SfG*SfG*SmAfA*Sm | 1452 | SSSSSSOSOSOS | 2′F on the middle U; | DMD |
| 3470 | UGGCAUUUCU | | GfA*SfUfG*SmGfC*SfA*SfU*SfU*SfU | | OSSSSSS | modified on WV-3152 | |
| | | | *SfC*SfU | | | | |
| WV- | UCAAGGAAGA | 701 | fU*SfC*SfA*SfA*SfG*SfG*SmAfA*Sm | 1453 | SSSSSSOSOSOO | 2′F on the middle U; | DMD |
| 3471 | UGGCAUUUCU | | GfA*SfUmGmGfC*SfA*SfU*SfU*SfU* | | OSSSSSS | modified on WV-3152 | |
| | | | SfC*SfU | | | | |
| WV- | UCAAGGAAGA | 702 | fU*SfC*SfA*SfA*SfG*SfG*SmAfA*Sm | 1454 | SSSSSSOSOSSO | 2′F on the middle U; | DMD |
| 3472 | UGGCAUUUCU | | GfA*SfU*SmGmGfC*SfA*SfU*SfU*Sf | | OSSSSSS | modified on WV-3152 | |
| | | | U*SfC*SfU | | | | |
| WV- | UCAAGGAAGA | 703 | fU*SfC*SfA*SfA*SfG*SfG*SmAfA*Sm | 1455 | SSSSSSOSOSSO | 2′F on the middle U; | DMD |
| 3473 | UGGCAUUUCU | | GmA*SfU*SmGmGfC*SfA*SfU*SfU*Sf | | OSSSSSS | modified on WV-3152 | |
| | | | U*SfC*SfU | | | | |
| WV- | UCAAGGAAGA | 704 | fU*SfC*SfA*SfA*SfG*SfG*SmAfA*Sm | 1456 | SSSSSSOSOOSO | modifed on WV-3472; | Exon 51 |
| 3506 | UGGCAUUUCU | | GfAfU*SmGmGfC*SfA*SfU*SfU*SfU* | | OSSSSSS | except for PO linker | |
| | | | SfC*SfU | | | between fA (10th nt) and | |
| | | | | | | fU (11th nt) | |
| WV- | UCAAGGAAGA | 705 | fU*SfC*SfA*SfA*SfG*SfG*SmAfA*Sm | 1457 | SSSSSSOSOOSO | modifed on WV-3473; | Exon 51 |
| 3507 | UGGCAUUUCU | | GmAfU*SmGmGfC*SfA*SfU*SfU*SfU | | OSSSSSS | except for PO linker | |
| | | | *SfC*SfU | | | between mA (10th nt) | |
| | | | | | | and fU (11th nt) | |
| WV- | UCAAGGAAGA | 706 | fU*SfC*SfA*SfA*SfG*SfG*SmAfA*Sm | 1458 | SSSSSSOSOSSO | modifed on WV-3472; | Exon 51 |
| 3508 | UGGCAUUUCU | | GfA*SfU*SmGmGfC*SfAfU*SfU*SfU* | | OSOSSSS | except for PO linker | |
| | | | SfC*SfU | | | between fA (15th nt) and | |
| | | | | | | fU (16th nt) | |
| WV- | UCAAGGAAGA | 707 | fU*SfC*SfA*SfA*SfG*SfG*SmAfA*Sm | 1459 | SSSSSSOSOSSO | modifed on WV-3473; | Exon 51 |
| 3509 | UGGCAUUUCU | | GmA*SfU*SmGmGfC*SfAfU*SfU*SfU | | OSOSSSS | except for PO linker | |
| | | | *SfC*SfU | | | between fA (15th nt) and | |
| | | | | | | fU (16th nt) | |
| WV- | UCAAGGAAGA | 708 | fU*SfC*SfA*SfA*SfG*SfG*SmAfA*Sm | 1460 | SSSSSSOSOOSO | modifed on WV-3472; | Exon 51 |
| 3510 | UGGCAUUUCU | | GfAfU*SmGmGfC*SmA*SfU*SfU*SfU | | OSSSSSS | except for mA on 15th nt | |
| | | | *SfC*SfU | | | | |
| WV- | UCAAGGAAGA | 709 | fU*SfC*SfA*SfA*SfG*SfG*SmAfA*Sm | 1461 | SSSSSSOSOOSO | modifed on WV-3473; | Exon 51 |
| 3511 | UGGCAUUUCU | | GmAfU*SmGmGfC*SmA*SfU*SfU*Sf | | OSSSSSS | except for mA on 15th nt | |
| | | | U*SfC*SfU | | | | |
| WV- | UCAAGGAAGA | 710 | fU*SfC*SfA*SfA*SfG*SfG*SmAfA*Sm | 1462 | SSSSSSOSOOSO | modifed on WV-3472; | Exon 51 |
| 3512 | UGGCAUUUCU | | GfAfU*SmGmGfC*SmAfU*SfU*SfU*Sf | | OSOSSSS | except for PO linker | |
| | | | C*SfU | | | between fA (10th nt) and | |
| | | | | | | fU (11th nt); mA on 15th | |
| | | | | | | nt, and PO between mA | |
| | | | | | | (15th nt) and fU (16th | |
| | | | | | | nt) | |
| WV- | UCAAGGAAGA | 711 | fU*SfC*SfA*SfA*SfG*SfG*SmAfA*Sm | 1463 | SSSSSSOSOOSO | modifed on WV-3472; | Exon 51 |
| 3513 | UGGCAUUUCU | | GmAfU*SmGmGfC*SmAfU*SfU*SfU* | | OSOSSSS | except for PO linker | |
| | | | SfC*SfU | | | between mA (10th nt) | |
| | | | | | | and fU (11th nt); mA on | |
| | | | | | | 15th nt, and PO between | |
| | | | | | | mA (15th nt) and fU | |
| | | | | | | (16th nt) | |
| WV- | UCAAGGAAGA | 712 | fU*SfC*SfA*SfA*SfG*SfG*SmAfA*Sm | 1464 | SSSSSSOSOOSO | modifed on WV-3472; | Exon 51 |
| 3514 | UGGCAUUUCU | | GfAfU*SmGmGfC*SfAfU*SfU*SfU*Sf | | OSOSSSS | except for PO linker | |
| | | | C*SfU | | | between fA (10th nt) and | |
| | | | | | | fU (11th nt); PO | |
| | | | | | | between fA (15th nt) and | |
| | | | | | | fU (16th nt) | |
| WV- | UCAAGGAAGA | 713 | fU*SfC*SfA*SfA*SfG*SfG*SmAfA*Sm | 1465 | SSSSSSOSOOSO | modifed on WV-3472; | Exon 51 |
| 3515 | UGGCAUUUCU | | GmAfU*SmGmGfC*SfAfU*SfU*SfU*Sf | | OSOSSSS | except for PO linker | |
| | | | C*SfU | | | between mA (10th nt) | |
| | | | | | | and fU (11th nt); PO | |
| | | | | | | between fA (15th nt) and | |
| | | | | | | fU (16th nt) | |
| WV- | UCAAGGAAGA | 714 | fU*fC*fA*fA*fG*fG*mAfA*mGfA*mU | 1466 | XXXXXXOXOX | randomer version of | Exon 51 |
| 3516 | UGGCAUUUCU | | fG*mGfC*fA*fU*fU*fU*fC*fU | | OXOXXXXXX | WV-3152 | |
| WV- | UCAAGGAAGA | 715 | Mod030fU*fC*fA*fA*fG*fG*mAfA*m | 1467 | OXXXXXXOXO | with PO linker, Lauric | Exon 51 |
| 3517 | UGGCAUUUCU | | GfA*mUfG*mGfC*fA*fU*fU*fU*fC*fU | | XOXOXXXXXX | | |
| WV- | UCAAGGAAGA | 716 | Mod031fU*fC*fA*fA*fG*fG*mAfA*m | 1468 | OXXXXXXOXO | with PO linker, Myristic | Exon 51 |
| 3518 | UGGCAUUUCU | | GfA*mUfG*mGfC*fA*fU*fU*fU*fC*fU | | XOXOXXXXXX | | |
| WV- | UCAAGGAAGA | 717 | Mod032fU*fC*fA*fA*fG*fG*mAfA*m | 1469 | OXXXXXXOXO | with PO linker, Palmitic | Exon 51 |
| 3519 | UGGCAUUUCU | | GfA*mUfG*mGfC*fA*fU*fU*fU*fC*fU | | XOXOXXXXXX | | |
| WV- | UCAAGGAAGA | 718 | Mod033fU*fC*fA*fA*fG*fG*mAfA*m | 1470 | OXXXXXXOXO | with PO linker, Stearic | Exon 51 |
| 3520 | UGGCAUUUCU | | GfA*mUfG*mGfC*fA*fU*fU*fU*fC*fU | | XOXOXXXXXX | | |
| WV- | UCAAGGAAGA | 719 | Mod013L001fU*SfC*SfA*SfA*SfG*SfG | 1471 | OOSSSSSSOSOS | WV-3473, Lauric acid, | Exon 51 |
| 3543 | UGGCAUUUCU | | *SmAfA*SmGmA*SfU*SmGmGfC*SfA | | SOOSSSSSS | C6 PO linker | |
| | | | *SfU*SfU*SfU*SfC*SfU | | | | |
| WV- | UCAAGGAAGA | 720 | Mod005L001fU*SfC*SfA*SfA*SfG*SfG | 1472 | OOSSSSSSOSOS | WV-3473, Palmitic acid, | Exon 51 |
| 3544 | UGGCAUUUCU | | *SmAfA*SmGmA*SfU*SmGmGfC*SfA | | SOOSSSSSS | C6 PO linker | |
| | | | *SfU*SfU*SfU*SfC*SfU | | | | |
| WV- | UCAAGGAAGA | 721 | Mod015L001fU*SfC*SfA*SfA*SfG*SfG | 1473 | OOSSSSSSOSOS | WV-3473, Stearic acid, | Exon 51 |
| 3545 | UGGCAUUUCU | | *SmAfA*SmGmA*SfU*SmGmGfC*SfA | | SOOSSSSSS | C6 PO linker | |
| | | | *SfU*SfU*SfU*SfC*SfU | | | | |
| WV- | UCAAGGAAGA | 722 | Mod020L001fU*SfC*SfA*SfA*SfG*SfG | 1474 | OOSSSSSSOSOS | WV-3473, Turbinaric | Exon 51 |
| 3546 | UGGCAUUUCU | | *SmAfA*SmGmA*SfU*SmGmGfC*SfA | | SOOSSSSSS | acid, C6 PO linker | |
| | | | *SfU*SfU*SfU*SfC*SfU | | | | |
| WV- | UCAAGGAAGA | 723 | Mod027L001fU*SfC*SfA*SfA*SfG*SfG | 1475 | OSSSSSSOSOSS | WV-3473, | Exon 51 |
| 3547 | UGGCAUUUCU | | *SmAfA*SmGmA*SfU*SmGmGfC*SfA | | OOSSSSSS | Monosulfonamide, C6 | |
| | | | *SfU*SfU*SfU*SfC*SfU | | | PO linker | |
| WV- | UCAAGGAAGA | 724 | Mod029L001fU*SfC*SfA*SfA*SfG*SfG | 1476 | OSSSSSSOSOSS | WV-3473, | Exon 51 |
| 3548 | UGGCAUUUCU | | *SmAfA*SmGmA*SfU*SmGmGfC*SfA | | OOSSSSSS | Trisulfonamide, C6 PO | |
| | | | *SfU*SfU*SfU*SfC*SfU | | | linker | |
| WV- | UCAAGGAAGA | 725 | Mod030fU*SfC*SfA*SfA*SfG*SfG*Sm | 1477 | OSSSSSSOSOSS | WV-3473, Laurie, PO | Exon 51 |
| 3549 | UGGCAUUUCU | | AfA*SmGmA*SfU*SmGmGfC*SfA*Sf | | OOSSSSSS | linker | |
| | | | U*SfU*SfU*SfC*SfU | | | | |
| WV- | UCAAGGAAGA | 726 | Mod032fU*SfC*SfA*SfA*SfG*SfG*Sm | 1478 | OSSSSSSOSOSS | WV-3473, Palmitic, PO | Exon 51 |
| 3550 | UGGCAUUUCU | | AfA*SmGmA*SfU*SmGmGfC*SfA*Sf | | OOSSSSSS | linker | |
| | | | U*SfU*SfU*SfC*SfU | | | | |
| WV- | UCAAGGAAGA | 727 | Mod033fU*SfC*SfA*SfA*SfG*SfG*Sm | 1479 | OSSSSSSOSOSS | WV-3473, Stearic, PO | Exon 51 |
| 3551 | UGGCAUUUCU | | AfA*SmGmA*SfU*SmGmGfC*SfA*Sf | | OOSSSSSS | linker | |
| | | | U*SfU*SfU*SfC*SfU | | | | |
| WV- | UCAAGGAAGA | 728 | Mod020L001*fU*SfC*SfA*SfA*SfG*Sf | 1480 | OXSSSSSSOSOS | WV-3473, Turbinaric | Exon 51 |
| 3552 | UGGCAUUUCU | | G*SmAfA*SmGmA*SfU*SmGmGfC*Sf | | SOOSSSSSS | acid, C6 PS linker | |
| | | | A*SfU*SfU*SfU*SfC*SfU | | | | |
| WV- | UCAAGGAAGA | 729 | Mod005L001*fU*SfC*SfA*SfA*SfG*Sf | 1481 | OXSSSSSSOSOS | WV-3473, Palmitic acid, | Exon 51 |
| 3553 | UGGCAUUUCU | | G*SmAfA*SmGmA*SfU*SmGmGfC*Sf | | SOOSSSSSS | C6 PS linker | |
| | | | A*SfU*SfU*SfU*SfC*SfU | | | | |
| WV- | UCAAGGAAGA | 730 | Mod014L001fU*SfC*SfA*SfA*SfG*SfG | 1482 | OOSSSSSSOSOS | WV-3473, Myristic acid, | Exon 51 |
| 3554 | UGGCAUUUCU | | *SmAfA*SmGmA*SfU*SmGmGfC*SfA | | SOOSSSSSS | C6 PO linker | |
| | | | *SfU*SfU*SfU*SfC*SfU | | | | |
| WV- | UCAAGGAAGA | 731 | Mod030*fU*SfC*SfA*SfA*SfG*SfG*S | 1483 | XSSSSSSOSOSS | WV-3473, Laurie PS | Exon 51 |
| 3555 | UGGCAUUUCU | | mAfA*SmGmA*SfU*SmGmGfC*SfA*S | | OOSSSSSS | linker | |
| | | | fU*SfU*SfU*SfC*SfU | | | | |
| WV- | UCAAGGAAGA | 732 | Mod032*fU*SfC*SfA*SfA*SfG*SfG*S | 1484 | XSSSSSSOSOSS | WV-3473, Palmitic PS | Exon 51 |
| 3556 | UGGCAUUUCU | | mAfA*SmGmA*SfU*SmGmGfC*SfA*5 | | OOSSSSSS | linker | |
| | | | fU*SfU*SfU*SfC*SfU | | | | |
| WV- | UCAAGGAAGA | 733 | Mod033*fU*SfC*SfA*SfA*SfG*SfG*S | 1485 | XSSSSSSOSOSS | WV-3473, Stearic PS | Exon 51 |
| 3557 | UGGCAUUUCU | | mAfA*SmGmA*SfU*SmGmGfC*SfA*5 | | OOSSSSSS | linker | |
| | | | fU*SfU*SfU*SfC*SfU | | | | |
| WV- | UCAAGGAAGA | 734 | Mod033*fU*fC*fA*fA*fG*fG*mAfA*m | 1486 | XXXXXXXOXO | with PS linker, Stearic | Exon 51 |
| 3558 | UGGCAUUUCU | | GfA*mUfG*mGfC*fA*fU*fU*fU*fC*fU | | XOXOXXXXXX | linker | |
| WV- | UCAAGGAAGA | 735 | Mod020L001fU*fC*fA*fA*fG*fG*mAf | 1487 | OOXXXXXXOX | with C6 amine PO | Exon 51 |
| 3559 | UGGCAUUUCU | | A*mGfA*mUfG*mGfC*fA*fU*fU*fU*f | | OXOXOXXXXXX | linker, Turbinaric acid | |
| WV- | UCAAGGAAGA | 736 | Mod020L001*fU*fC*fA*fA*fG*fG*mAf | 1488 | OXXXXXXXOX | with C6 amine PS linker, | Exon 51 |
| 3560 | UGGCAUUUCU | | A*mGfA*mUfG*mGfC*fA*fU*fU*fU*f | | OXOXOXXXXXX | Turbinaric acid | |
| | | | C*fU | | | | |
| WV- | UCAAGGAAGA | 737 | L001*fU*SfC*SfA*SfA*SfG*SfG*SmAf | 1489 | XSSSSSSOSOSS | WV-3473, C6 PS linker | Exon 51 |
| 3753 | UGGCAUUUCU | | A* SmGmA*SfU*SmGmGfC*SfA*SfU* | | OOSSSSSS | | |
| | | | SfU*SfU*SfC*SfU | | | | |
| WV- | UCAAGGAAGA | 738 | L001fU*SfC*SfA*SfA*SfG*SfG*SmAf | 1490 | OSSSSSSOSOSS | WV-3473, C6 PO linker | Exon 51 |
| 3754 | UGGCAUUUCU | | A* SmGmA*SfU*SmGmGfC*SfA*SfU* | | OOSSSSSS | | |
| | | | SfU*SfU*SfC*SfU | | | | |
| WV- | GCCAACUGGG | 739 | rGrCrCrArArCrUrGrGrGrArGrCrUrGrGr | 1491 | OOOOOOOOOO | Complementary RNA | MSTN |
| 3812 | AGCUGGAGCG | | ArGrCrGrCrArCrCrArArCrCrArG | | OOOOOOOOOO | | |
| | CACCAACCAG | | | | OOOOOOOOO | | |
| WV- | UCAAGGAAGA | 740 | L001*fU*fC*fA*fA*fG*fG*mAfA*mGf | 1492 | XXXXXXXOXO | WV-3516, C6 PS linker | Exon 51 |
| 3820 | UGGCAUUUCU | | A*mUfG*mGfC*fA*fU*fU*fU*fC*fU | | XOXOXXXXXX | | |
| WV- | UCAAGGAAGA | 741 | L001fU*fC*fA*fA*fG*fG*mAfA*mGfA | 1493 | OXXXXXXOXO | WV-3516, C6 PO linker | Exon 51 |
| 3821 | UGGCAUUUCU | | *mUfG*mGfC*fA*fU*fU*fU*fC*fU | | XOXOXXXXXX | | |
| WV- | UCAAGGAAGA | 742 | Mod015L001*fU*fC*fA*fA*fG*fG*mAf | 1494 | OXXXXXXXOX | WV-3516, C6 PS linker, | Exon 51 |
| 3855 | UGGCAUUUCU | | A*mGfA*mUfG*mGfC*fA*fU*fU*fU*f | | OXOXOXXXXXX | Stearic acid | |
| | | | C*fU | | | | |
| WV- | UCAAGGAAGA | 743 | Mod015L001fU*fC*fA*fA*fG*fG*mAf | 1495 | OOXXXXXXOX | WV-3516, C6 PO linker, | Exon 51 |
| 3856 | UGGCAUUUCU | | A*mGfA*mUfG*mGfC*fA*fU*fU*fU*f | | OXOXOXXXXXX | Stearic acid | |
| | | | C*fU | | | | |
| WV- | CCUUCCCUGAA | 744 | fC*fC*fU*fU*fC*fC*mCfU*GmAfA*m | 1496 | XXXXXXOXOO | Negative control | NA |
| 3975 | GGUUCCUCC | | GmGfU*fU*fC*fC*fU*fC*fC | | XOOXXXXXX | | |
| WV- | CCUUCCCUGAA | 745 | L001fC*fC*fU*fU*fC*fC*mCfU*GmAf | 1497 | OXXXXXXOXO | Negative control | NA |
| 3976 | GGUUCCUCC | | A*mGmGfU*fU*fC*fC*fU*fC*fC | | OXOOXXXXXX | | |
| WV- | CCUUCCCUGAA | 746 | Mod020L001fC*fC*fU*fU*fC*fC*mCfU | 1498 | OOXXXXXXOX | Negative control | NA |
| 3977 | GGUUCCUCC | | *GmAfA*mGmGfU*fU*fC*fC*fU*fC*fC | | OOXOOXXXXXX | | |
| WV- | CCUUCCCUGAA | 747 | fC*fC*fU*fU*fC*fC*mCfU*mGmAfA* | 1499 | XXXXXXOXOO | Negative control | NA |
| 3978 | GGUUCCUCC | | mGmGfU*fU*fC*fC*fU*fC*fC | | XOOXXXXXX | | |
| WV- | CCUUCCCUGAA | 748 | L001fC*fC*fU*fU*fC*fC*mCfU*mGm | 1500 | OXXXXXXOXO | Negative control | NA |
| 3979 | GGUUCCUCC | | AfA*mGmGfU*fU*fC*fC*fU*fC*fC | | OXOOXXXXXX | | |
| WV- | CCUUCCCUGAA | 749 | Mod020L001fC*fC*fU*fU*fC*fC*mCfU | 1501 | OOXXXXXXOX | Negative control | NA |
| 3980 | GGUUCCUCC | | *mGmAfA*mGmGfU*fU*fC*fC*fU*fC | | OOXOOXXXXXX | | |
| | | | *fC | | | | |
| WV- | UCAAGGAAGA | 750 | Mod015L001*fU*SfC*SfA*SfA*SfG*Sf | 1502 | OXSSSSSSOSOS | WV-3473, C6 PS linker, | Exon 51 |
| 4106 | UGGCAUUUCU | | G*SmAfA*SmGmA*SfU*SmGmGfC*Sf | | SOOSSSSSS | Stearic acid | |
| | | | A*SfU*SfU*SfU*SfC*SfU | | | | |
| WV- | UCAAGGAAGA | 751 | Mod015L001*SfU*SfC*SfA*SfA*SfG*S | 1503 | OSSSSSSSOSOSS | WV-3473, Sp stereopure | DMD |
| 4107 | UGGCAUUUCU | | fG*SmAfA*SmGmA*SfU*SmGmGfC*S | | OOSSSSSS | C6 linker, stearic acid | |
| | | | fA*SfU*SfU*SfU*SfC*SfU | | | | |
| WV- | UCAAGGAAGA | 752 | L001 * SfU * SfC * SfA * SfA * SfG * | 1504 | SSSSSSSOSOSSO | WV-3473, C6 and Sp | DMD |
| 4191 | UGGCAUUUCU | | SfG * SmAfA * SmGmA * SfU * | | OSSSSSS | stereopure linker | |
| | | | SmGmGfC * SfA * SfU * SfU * SfU * | | | | |
| | | | SfC * SfU | | | | |
| WV- | UCAAGGAAGA | 753 | fU*SfC*SfA*SfA*SfG*SfG*SmAfA*Sm | 1505 | SSSSSSOSOSSO | WV-3473 based, n-1 on | DMD |
| 4231 | UGGCAUUUC | | GmA*SfU*SmGmGfC*SfA*SfU*SfU*Sf | | OSSSSS | 3′ | |
| | | | U*SfC | | | | |
| WV- | UCAAGGAAGA | 754 | fU*SfC*SfA*SfA*SfG*SfG*SmAfA*Sm | 1506 | SSSSSSOSOSSO | WV-3473 based, n-2 on | DMD |
| 4232 | UGGCAUUU | | GmA*SfU*SmGmGfC*SfA*SfU*SfU*SfU | | OSSSS | 3′ | |
| WV- | CAAGGAAGAU | 755 | fC*SfA*SfA*SfG*SfG*SmAfA*SmGmA | 1507 | SSSSSOSOSSOO | WV-3473 based, n-1 on | DMD |
| 4233 | GGCAUUUCU | | *SfU*SmGmGfC*SfA*SfU*SfU*SfU*Sf | | SSSSSS | 5′ | |
| | | | C*SfU | | | | |
| WV- | GGCCAAACCUC | 756 | Mod020L001mG*mG*mC*mC*mA*mA | 1508 | OOXXXXXXXX | WV-943, C6 linker and | DMD |
| 4610 | GGCUUACCU | | *mA*mC*mC*mU*mC*mG*mG*mC*m | | XXXXXXXXXXX | PO, Turbinaric acid | mouse |
| | | | U*mU*mA*mC*mC*mU | | | | Exon23 |
| WV- | GGCCAAACCUC | 757 | Mod015L001mG*mG*mC*mC*mA*mA | 1509 | OOXXXXXXXX | WV-943, C6 linker and | DMD |
| 4611 | GGCUUACCU | | *mA*mC*mC*mU*mC*mG*mG*mC*m | | XXXXXXXXXXX | PO, Stearic acid | mouse |
| | | | U*mU*mA*mC*mC*mU | | | | Exon23 |
| WV- | UUCUGUAAGG | 758 | fU*fU*fC*fU*fG*fU*mA*mA*mG*mG | 1510 | XXXXXXXXXX | DMD mouse Exon23 | DMD |
| 4614 | UUUUUAUGUG | | *mU*mU*mU*mU*fU*fA*fU*fG*fU*fG | | XXXXXXXXX | | |
| WV- | AUUUCUGUAA | 759 | fA*fU*fU*fU*fC*fU*mG*mU*mA*mA | 1511 | XXXXXXXXXX | DMD mouse Exon23 | DMD |
| 4615 | GGUUUUUAUG | | *mG*mG*mU*mU*fU*fU*fU*fA*fU*fG | | XXXXXXXXX | | |
| WV- | CCAUUUCUGU | 760 | fC*fC*fA*fU*fU*fU*mC*mU*mG*mU* | 1512 | XXXXXXXXXX | DMD mouse Exon23 | DMD |
| 4616 | AAGGUUUUUA | | mA*mA*mG*mG*fU*fU*fU*fU*fU*fA | | XXXXXXXXX | | |
| WV- | AUCCAUUUCU | 761 | fA*fU*fC*fC*fA*fU*mU*mU*mC*mU* | 1513 | XXXXXXXXXX | DMD mouse Exon23 | DMD |
| 4617 | GUAAGGUUUU | | mG*mU*mA*mA*fG*fG*fU*fU*fU*fU | | XXXXXXXXX | | |
| WV- | CAUCCAUUUCU | 762 | fC*fA*fU*fC*fC*fA*mU*mU*mU*mC* | 1514 | XXXXXXXXXX | DMD mouse Exon23 | DMD |
| 4618 | GUAAGGUUU | | mU*mG*mU*mA*fA*fG*fG*fU*fU*fU | | XXXXXXXXX | | |
| WV- | CCAUCCAUUUC | 763 | fC*fC*fA*fU*fC*fC*mA*mU*mU*mU* | 1515 | XXXXXXXXXX | DMD mouse Exon23 | DMD |
| 4619 | UGUAAGGUU | | mC*mU*mG*mU*fA*fA*fG*fG*fU*fU | | XXXXXXXXX | | |
| WV- | GCCAUCCAUUU | 764 | fG*fC*fC*fA*fU*fC*mC*mA*mU*mU* | 1516 | XXXXXXXXXX | DMD mouse Exon23 | DMD |
| 4620 | CUGUAAGGU | | mU*mC*mU*mG*fU*fA*fA*fG*fG*fU | | XXXXXXXXX | | |
| WV- | AGCCAUCCAUU | 765 | fA*fG*fC*fC*fA*fU*mC*mC*mA*mU* | 1517 | XXXXXXXXXX | DMD mouse Exon23 | DMD |
| 4621 | UCUGUAAGG | | mU*mU*mC*mU*fG*fU*fA*fA*fG*fG | | XXXXXXXXX | | |
| WV- | CAGCCAUCCAU | 766 | fC*fA*fG*fC*fC*fA*mU*mC*mC*mA* | 1518 | XXXXXXXXXX | DMD mouse Exon23 | DMD |
| 4622 | UUCUGUAAG | | mU*mU*mU*mC*fU*fG*fU*fA*fA*fG | | XXXXXXXXX | | |
| WV- | UCAGCCAUCCA | 767 | fU*fC*fA*fG*fC*fC*mA*mU*mC*mC* | 1519 | XXXXXXXXXX | DMD mouse Exon23 | DMD |
| 4623 | UUUCUGUAA | | mA*mU*mU*mU*fC*fU*fG*fU*fA*fA | | XXXXXXXXX | | |
| WV- | UUCAGCCAUCC | 768 | fU*fU*fC*fA*fG*fC*mC*mA*mU*mC* | 1520 | XXXXXXXXXX | DMD mouse Exon23 | DMD |
| 4624 | AUUUCUGUA | | mC*mA*mU*mU*fU*fC*fU*fG*fU*fA | | XXXXXXXXX | | |
| WV- | CUUCAGCCAUC | 769 | fC*fU*fU*fC*fA*fG*mC*mC*mA*mU* | 1521 | XXXXXXXXXX | DMD mouse Exon23 | DMD |
| 4625 | CAUUUCUGU | | mC*mC*mA*mU*fU*fU*fC*ffl*fG*fU | | XXXXXXXXX | | |
| WV- | ACUUCAGCCAU | 770 | fA*fC*fU*fU*fC*fA*mG*mC*mC*mA* | 1522 | XXXXXXXXXX | DMD mouse Exon23 | DMD |
| 4626 | CCAUUUCUG | | mU*mC*mC*mA*fU*fU*fU*fC*fU*fG | | XXXXXXXXX | | |
| WV- | AACUUCAGCCA | 771 | fA*fA*fC*fU*fU*fC*mA*mG*mC*mC* | 1523 | XXXXXXXXXX | DMD mouse Exon23 | DMD |
| 4627 | UCCAUUUCU | | mA*mU*mC*mC*fA*fU*fU*fU*fC*fU | | XXXXXXXXX | | |
| WV- | CAACUUCAGCC | 772 | fC*fA*fA*fC*fU*fU*mC*mA*mG*mC* | 1524 | XXXXXXXXXX | DMD mouse Exon23 | DMD |
| 4628 | AUCCAUUUC | | mC*mA*mU*mC*fC*fA*fU*fU*fU*fC | | XXXXXXXXX | | |
| WV- | UCAACUUCAGC | 773 | fU*fC*fA*fA*fC*fU*mU*mC*mA*mG* | 1525 | XXXXXXXXXX | DMD mouse Exon23 | DMD |
| 4629 | CAUCCAUUU | | mC*mC*mA*mU*fC*fC*fA*fU*fU*fU | | XXXXXXXXX | | |
| WV- | AUCAACUUCA | 774 | fA*fU*fC*fA*fA*fC*mU*mU*mC*mA* | 1526 | XXXXXXXXXX | DMD mouse Exon23 | DMD |
| 4630 | GCCAUCCAUU | | mG*mC*mC*mA*fU*fC*fC*fA*fU*fU | | XXXXXXXXX | | |
| WV- | CAUCAACUUCA | 775 | fC*fA*fU*fC*fA*fA*mC*mU*mU*mC* | 1527 | XXXXXXXXXX | DMD mouse Exon23 | DMD |
| 4631 | GCCAUCCAU | | mA*mG*mC*mC*fA*fU*fC*fC*fA*fU | | XXXXXXXXX | | |
| WV- | ACAUCAACUUC | 776 | fA*fC*fA*fU*fC*fA*mA*mC*mU*mU* | 1528 | XXXXXXXXXX | DMD mouse Exon23 | DMD |
| 4632 | AGCCAUCCA | | mC*mA*mG*mC*fC*fA*fU*fC*fC*fA | | XXXXXXXXX | | |
| WV- | AACAUCAACU | 777 | fA*fA*fC*fA*fU*fC*mA*mA*mC*mU* | 1529 | XXXXXXXXXX | DMD mouse Exon23 | DMD |
| 4633 | UCAGCCAUCC | | mU*mC*mA*mG*fC*fC*fA*fU*fC*fC | | XXXXXXXXX | | |
| WV- | GAAAACAUCA | 778 | fG*fA*fA*fA*fA*fC*mA*mU*mC*mA | 1530 | XXXXXXXXXX | DMD mouse Exon23 | DMD |
| 4634 | ACUUCAGCCA | | *mA*mC*mU*mU*fC*fA*fG*fC*fC*fA | | XXXXXXXXX | | |
| WV- | CAGGAAAACA | 779 | fC*fA*fG*fG*fA*fA*mA*mA*mC*mA | 1531 | XXXXXXXXXX | DMD mouse Exon23 | DMD |
| 4635 | UCAACUUCAG | | *mU*mC*mA*mA*fC*fU*fU*fC*fA*fG | | XXXXXXXXX | | |
| WV- | UUUCAGGAAA | 780 | fU*fU*fU*fC*fA*fG*mG*mA*mA*mA | 1532 | XXXXXXXXXX | DMD mouse Exon23 | DMD |
| 4636 | ACAUCAACUU | | *mA*mC*mA*mU*fC*fA*fA*fC*fU*fU | | XXXXXXXXX | | |
| WV- | CUCUUUCAGG | 781 | fC*fU*fC*fU*fU*fU*mC*mA*mG*mG* | 1533 | XXXXXXXXXX | DMD mouse Exon23 | DMD |
| 4637 | AAAACAUCAA | | mA*mA*mA*mA*fC*fA*fU*fC*fA*fA | | XXXXXXXXX | | |
| WV- | UUCCUCUUUCA | 782 | fU*fU*fC*fC*fU*fC*mU*mU*mU*mC* | 1534 | XXXXXXXXXX | DMD mouse Exon23 | DMD |
| 4638 | GGAAAACAU | | mA*mG*mG*mA*fA*fA*fA*fC*fA*fU | | XXXXXXXXX | | |
| WV- | GCCAUUCCUCU | 783 | fG*fC*fC*fA*ftl*fU*mC*mC*mU*mC* | 1535 | XXXXXXXXXX | DMD mouse Exon23 | DMD |
| 4639 | UUCAGGAAA | | mU*mU*mU*mC*fA*fG*fG*fA*fA*fA | | XXXXXXXXX | | |
| WV- | GGCCAUUCCUC | 784 | fG*fG*fC*fC*fA*fU*mU*mC*mC*mU* | 1536 | XXXXXXXXXX | DMD mouse Exon23 | DMD |
| 4640 | UUUCAGGAA | | mC*mU*mU*mU*fC*fA*fG*fG*fA*fA | | XXXXXXXXX | | |
| WV- | AGGCCAUUCCU | 785 | fA*fG*fG*fC*fC*fA*mU*mU*mC*mC* | 1537 | XXXXXXXXXX | DMD mouse Exon23 | DMD |
| 4641 | CUUUCAGGA | | mU*mC*mU*mU*fU*fC*fA*fG*fG*fA | | XXXXXXXXX | | |
| WV- | CAGGCCAUUCC | 786 | fC*fA*fG*fG*fC*fC*mA*mU*mU*mC* | 1538 | XXXXXXXXXX | DMD mouse Exon23 | DMD |
| 4642 | UCUUUCAGG | | mC*mU*mC*mU*fU*fU*fC*fA*fG*fG | | XXXXXXXXX | | |
| WV- | GCAGGCCAUUC | 787 | fG*fC*fA*fG*fG*fC*mC*mA*mU*mU* | 1539 | XXXXXXXXXX | DMD mouse Exon23 | DMD |
| 4643 | CUCUUUCAG | | mC*mC*mU*mC*fU*fU*fU*fC*fA*fG | | XXXXXXXXX | | |
| WV- | GGCAGGCCAU | 788 | fG*fG*fC*fA*fG*fG*mC*mC*mA*mU* | 1540 | XXXXXXXXXX | DMD mouse Exon23 | DMD |
| 4644 | UCCUCUUUCA | | mU*mC*mC*mU*fC*fU*fU*fU*fC*fA | | XXXXXXXXX | | |
| WV- | GGGCAGGCCA | 789 | fG*fG*fG*fC*fA*fG*mG*mC*mC*mA* | 1541 | XXXXXXXXXX | DMD mouse Exon23 | DMD |
| 4645 | UUCCUCUUUC | | mU*mU*mC*mC*fU*fC*fU*fU*fU*fC | | XXXXXXXXX | | |
| WV- | AGGGCAGGCC | 790 | fA*fG*fG*fG*fC*fA*mG*mG*mC*mC* | 1542 | XXXXXXXXXX | DMD mouse Exon23 | DMD |
| 4646 | AUUCCUCUUU | | mA*mU*mU*mC*fC*fU*fC*fU*fU*fU | | XXXXXXXXX | | |
| WV- | CAGGGCAGGCC | 791 | fC*fA*fG*fG*fG*fC*mA*mG*mG*mC* | 1543 | XXXXXXXXXX | DMD mouse Exon23 | DMD |
| 4647 | AUUCCUCUU | | mC*mA*mU*mU*fC*fC*fU*fC*fU*fU | | XXXXXXXXX | | |
| WV- | CCAGGGCAGGC | 792 | fC*fC*fA*fG*fG*fG*mC*mA*mG*mG* | 1544 | XXXXXXXXXX | DMD mouse Exon23 | DMD |
| 4648 | CAUUCCUCU | | mC*mC*mA*mU*fU*fC*fC*fU*fC*fU | | XXXXXXXXX | | |
| WV- | CCCAGGGCAGG | 793 | fC*fC*fC*fA*fG*fG*mG*mC*mA*mG* | 1545 | XXXXXXXXXX | DMD mouse Exon23 | DMD |
| 4649 | CCAUUCCUC | | mG*mC*mC*mA*fU*fU*fC*fC*fU*fC | | XXXXXXXXX | | |
| WV- | CCCCAGGGCAG | 794 | fC*fC*fC*fC*fA*fG*mG*mG*mC*mA* | 1546 | XXXXXXXXXX | DMD mouse Exon23 | DMD |
| 4650 | GCCAUUCCU | | mG*mG*mC*mC*fA*fU*fU*fC*fC*fU | | XXXXXXXXX | | |
| WV- | CCCCCAGGGCA | 795 | fC*fC*fC*fC*fC*fA*mG*mG*mG*mC* | 1547 | XXXXXXXXXX | DMD mouse Exon23 | DMD |
| 4651 | GGCCAUUCC | | mA*mG*mG*mC*fC*fA*fU*fU*fC*fC | | XXXXXXXXX | | |
| WV- | UCCCCCAGGGC | 796 | fU*fC*fC*fC*fC*fC*mA*mG*mG*mG* | 1548 | XXXXXXXXXX | DMD mouse Exon23 | DMD |
| 4652 | AGGCCAUUC | | mC*mA*mG*mG*fC*fC*fA*fU*fU*fC | | XXXXXXXXX | | |
| WV- | AUCCCCCAGGG | 797 | fA*fU*fC*fC*fC*fC*mC*mA*mG*mG* | 1549 | XXXXXXXXXX | DMD mouse Exon23 | DMD |
| 4653 | CAGGCCAUU | | mG*mC*mA*mG*fG*fC*fC*fA*fU*fU | | XXXXXXXXX | | |
| WV- | CAUCCCCCAGG | 798 | fC*fA*fU*fC*fC*fC*mC*mC*mA*mG* | 1550 | XXXXXXXXXX | DMD mouse Exon23 | DMD |
| 4654 | GCAGGCCAU | | mG*mG*mC*mA*fG*fG*fC*fC*fA*fU | | XXXXXXXXX | | |
| WV- | GCAUCCCCCAG | 799 | fG*fC*fA*fU*fC*fC*mC*mC*mC*mA* | 1551 | XXXXXXXXXX | DMD mouse Exon23 | DMD |
| 4655 | GGCAGGCCA | | mG*mG*mG*mC*fA*fG*fG*fC*fC*fA | | XXXXXXXXX | | |
| WV- | AGCAUCCCCCA | 800 | fA*fG*fC*fA*fU*fC*mC*mC*mC*mC* | 1552 | XXXXXXXXXX | DMD mouse Exon23 | DMD |
| 4656 | GGGCAGGCC | | mA*mG*mG*mG*fC*fA*fG*fG*fC*fC | | XXXXXXXXX | | |
| WV- | CAGCAUCCCCC | 801 | fC*fA*fG*fC*fA*fU*mC*mC*mC*mC* | 1553 | XXXXXXXXXX | DMD mouse Exon23 | DMD |
| 4657 | AGGGCAGGC | | mC*mA*mG*mG*fG*fC*fA*fG*fG*fC | | XXXXXXXXX | | |
| WV- | UCAGCAUCCCC | 802 | fU*fC*fA*fG*fC*fA*mU*mC*mC*mC* | 1554 | XXXXXXXXXX | DMD mouse Exon23 | DMD |
| 4658 | CAGGGCAGG | | mC*mC*mA*mG*fG*fG*fC*fA*fG*fG | | XXXXXXXXX | | |
| WV- | UUCAGCAUCCC | 803 | fU*fU*fC*fA*fG*fC*mA*mU*mC*mC* | 1555 | XXXXXXXXXX | DMD mouse Exon23 | DMD |
| 4659 | CCAGGGCAG | | mC*mC*mC*mA*fG*fG*fG*fC*fA*fG | | XXXXXXXXX | | |
| WV- | UUUCAGCAUCC | 804 | fU*fU*fU*fC*fA*fG*mC*mA*mU*mC* | 1556 | XXXXXXXXXX | DMD mouse Exon23 | DMD |
| 4660 | CCCAGGGCA | | mC*mC*mC*mC*fA*fG*fG*fG*fC*fA | | XXXXXXXXX | | |
| WV- | AUUUCAGCAU | 805 | fA*fU*fU*fU*fC*fA*mG*mC*mA*mU | 1557 | XXXXXXXXXX | DMD mouse Exon23 | DMD |
| 4661 | CCCCCAGGGC | | *mC*mC*mC*mC*fC*fA*fG*fG*fG*fC | | XXXXXXXXX | | |
| WV- | GAUUUCAGCA | 806 | fG*fA*fU*fU*fU*fC*mA*mG*mC*mA | 1558 | XXXXXXXXXX | DMD mouse Exon23 | DMD |
| 4662 | UCCCCCAGGG | | *mU*mC*mC*mC*fC*fC*fA*fG*fG*fG | | XXXXXXXXX | | |
| WV- | GGAUUUCAGC | 807 | fG*fG*fA*fU*fU*fU*mC*mA*mG*mC | 1559 | XXXXXXXXXX | DMD mouse Exon23 | DMD |
| 4663 | AUCCCCCAGG | | *mA*mU*mC*mC*fC*fC*fC*fA*fG*fG | | XXXXXXXXX | | |
| WV- | AGGAUUUCAG | 808 | fA*fG*fG*fA*fU*fU*mU*mC*mA*mG | 1560 | XXXXXXXXXX | DMD mouse Exon23 | DMD |
| 4664 | CAUCCCCCAG | | *mC*mA*mU*mC*fC*fC*fC*fC*fA*fG | | XXXXXXXXX | | |
| WV- | CAGGAUUUCA | 809 | fC*fA*fG*fG*fA*fU*mU*mU*mC*mA | 1561 | XXXXXXXXXX | DMD mouse Exon23 | DMD |
| 4665 | GCAUCCCCCA | | *mG*mC*mA*mU*fC*fC*fC*fC*fC*fA | | XXXXXXXXX | | |
| WV- | UCAGGAUUUC | 810 | fU*fC*fA*fG*fG*fA*mU*mU*mU*mC | 1562 | XXXXXXXXXX | DMD mouse Exon23 | DMD |
| 4666 | AGCAUCCCCC | | *mA*mG*mC*mA*fU*fC*fC*fC*fC*fC | | XXXXXXXXX | | |
| WV- | UUCAGGAUUU | 811 | fU*fU*fC*fA*fG*fG*mA*mU*mU*mU | 1563 | XXXXXXXXXX | DMD mouse Exon23 | DMD |
| 4667 | CAGCAUCCCC | | *mC*mA*mG*mC*fA*fU*fC*fC*fC*fC | | XXXXXXXXX | | |
| WV- | UUUCAGGAUU | 812 | fU*fU*fU*fC*fA*fG*mG*mA*mU*mU | 1564 | XXXXXXXXXX | DMD mouse Exon23 | DMD |
| 4668 | UCAGCAUCCC | | *mU*mC*mA*mG*fC*fA*fU*fC*fC*fC | | XXXXXXXXX | | |
| WV- | UUUUCAGGAU | 813 | fU*fU*fU*fU*fC*fA*mG*mG*mA*mU | 1565 | XXXXXXXXXX | DMD mouse Exon23 | DMD |
| 4669 | UUCAGCAUCC | | *mU*mU*mC*mA*fG*fC*fA*fU*fC*fC | | XXXXXXXXX | | |
| WV- | UUUUUCAGGA | 814 | fU*fU*fU*fU*fU*fC*mA*mG*mG*mA | 1566 | XXXXXXXXXX | DMD mouse Exon23 | DMD |
| 4670 | UUUCAGCAUC | | *mU*mU*mU*mC*fA*fG*fC*fA*fU*fC | | XXXXXXXXX | | |
| WV- | UUUUUUCAGG | 815 | fU*fU*fU*fU*fU*fU*mC*mA*mG*mG | 1567 | XXXXXXXXXX | DMD mouse Exon23 | DMD |
| 4671 | AUUUCAGCAU | | *mA*mU*mU*mU*fC*fA*fG*fC*fA*fU | | XXXXXXXXX | | |
| WV- | GUUUUUUCAG | 816 | fG*fU*fU*fU*fU*fU*mU*mC*mA*mG | 1568 | XXXXXXXXXX | DMD mouse Exon23 | DMD |
| 4672 | GAUUUCAGCA | | *mG*mA*mU*mU*fU*fC*fA*fG*fC*fA | | XXXXXXXXX | | |
| WV- | UGUUUUUUCA | 817 | fU*fG*fU*fU*fU*fU*mU*mU*mC*mA | 1569 | XXXXXXXXXX | DMD mouse Exon23 | DMD |
| 4673 | GGAUUUCAGC | | *mG*mG*mA*mU*fU*fU*fC*fA*fG*fC | | XXXXXXXXX | | |
| WV- | CUGUUUUUUC | 818 | fC*fU*fG*fU*fU*fU*mU*mU*mU*mC | 1570 | XXXXXXXXXX | DMD mouse Exon23 | DMD |
| 4674 | AGGAUUUCAG | | *mA*mG*mG*mA*fU*fU*fU*fC*fA*fG | | XXXXXXXXX | | |
| WV- | GCUGUUUUUU | 819 | fG*fC*fU*fG*fU*fU*mU*mU*mU*mU | 1571 | XXXXXXXXXX | DMD mouse Exon23 | DMD |
| 4675 | CAGGAUUUCA | | *mC*mA*mG*mG*fA*fU*fU*fU*fC*fA | | XXXXXXXXX | | |
| WV- | AGCUGUUUUU | 820 | fA*fG*fC*fU*fG*fU*mU*mU*mU*mU | 1572 | XXXXXXXXXX | DMD mouse Exon23 | DMD |
| 4676 | UCAGGAUUUC | | *mU*mC*mA*mG*fG*fA*fU*fU*fU*fC | | XXXXXXXXX | | |
| WV- | GAGCUGUUUU | 821 | fG*fA*fG*fC*fU*fG*mU*mU*mU*mU | 1573 | XXXXXXXXXX | DMD mouse Exon23 | DMD |
| 4677 | UUCAGGAUUU | | *mU*mU*mC*mA*fG*fG*fA*fU*fU*fU | | XXXXXXXXX | | |
| WV- | UGAGCUGUUU | 822 | fU*fG*fA*fG*fC*fU*mG*mU*mU*mU | 1574 | XXXXXXXXXX | DMD mouse Exon23 | DMD |
| 4678 | UUUCAGGAUU | | *mU*mU*mU*mC*fA*fG*fG*fA*fU*fU | | XXXXXXXXX | | |
| WV- | UUGAGCUGUU | 823 | fU*fU*fG*fA*fG*fC*mU*mG*mU*mU | 1575 | XXXXXXXXXX | DMD mouse Exon23 | DMD |
| 4679 | UUUUCAGGAU | | *mU*mU*mU*mU*fC*fA*fG*fG*fA*fU | | XXXXXXXXX | | |
| WV- | UUUGAGCUGU | 824 | fU*fU*fU*fG*fA*fG*mC*mU*mG*mU | 1576 | XXXXXXXXXX | DMD mouse Exon23 | DMD |
| 4680 | UUUUUCAGGA | | *mU*mU*mU*mU*fU*fC*fA*fG*fG*fA | | XXXXXXXXX | | |
| WV- | GUUUGAGCUG | 825 | fG*fU*fU*fU*fG*fA*mG*mC*mU*mG | 1577 | XXXXXXXXXX | DMD mouse Exon23 | DMD |
| 4681 | UUUUUUCAGG | | *mU*mU*mU*mU*fU*fU*fC*fA*fG*fG | | XXXXXXXXX | | |
| WV- | UUGUUUGAGC | 826 | fU*fU*fG*fU*fU*fU*mG*mA*mG*mC | 1578 | XXXXXXXXXX | DMD mouse Exon23 | DMD |
| 4682 | UGUUUUUUCA | | *mU*mG*mU*mU*fU*fU*fU*fU*fC*fA | | XXXXXXXXX | | |
| WV- | CAUUGUUUGA | 827 | fC*fA*fU*fU*fG*fU*mU*mU*mG*mA | 1579 | XXXXXXXXXX | DMD mouse Exon23 | DMD |
| 4683 | GCUGUUUUUU | | *mG*mC*mU*mG*fU*fU*fU*fU*fU*fU | | XXXXXXXXX | | |
| WV- | GCAUUGUUUG | 828 | fG*fC*fA*fU*fU*fG*mU*mU*mU*mG | 1580 | XXXXXXXXXX | DMD mouse Exon23 | DMD |
| 4684 | AGCUGUUUUU | | *mA*mG*mC*mU*fG*fU*fU*fU*fU*fU | | XXXXXXXXX | | |
| WV- | UGCAUUGUUU | 829 | fU*fG*fC*fA*fU*fU*mG*mU*mU*mU | 1581 | XXXXXXXXXX | DMD mouse Exon23 | DMD |
| 4685 | GAGCUGUUUU | | *mG*mA*mG*mC*fU*fG*fU*fU*fU*fU | | XXXXXXXXX | | |
| WV- | CUGCAUUGUU | 830 | fC*fU*fG*fC*fA*fU*mU*mG*mU*mU | 1582 | XXXXXXXXXX | DMD mouse Exon23 | DMD |
| 4686 | UGAGCUGUUU | | *mU*mG*mA*mG*fC*fU*fG*fU*fU*fU | | XXXXXXXXX | | |
| WV- | UCUGCAUUGU | 831 | fU*fC*fU*fG*fC*fA*mU*mU*mG*mU | 1583 | XXXXXXXXXX | DMD mouse Exon23 | DMD |
| 4687 | UUGAGCUGUU | | *mU*mU*mG*mA*fG*fC*fU*fG*fU*fU | | XXXXXXXXX | | |
| WV- | CUCUGCAUUG | 832 | fC*fU*fC*fU*fG*fC*mA*mU*mU*mG* | 1584 | XXXXXXXXXX | DMD mouse Exon23 | DMD |
| 4688 | UUUGAGCUGU | | mU*mU*mU*mG*fA*fG*fC*fU*fG*fU | | XXXXXXXXX | | |
| WV- | ACUCUGCAUU | 833 | fA*fC*fU*fC*fU*fG*mC*mA*mU*mU* | 1585 | XXXXXXXXXX | DMD mouse Exon23 | DMD |
| 4689 | GUUUGAGCUG | | mG*mU*mU*mU*fG*fA*fG*fC*fU*fG | | XXXXXXXXX | | |
| WV- | UACUCUGCAU | 834 | fU*fA*fC*fU*fC*fU*mG*mC*mA*mU* | 1586 | XXXXXXXXXX | DMD mouse Exon23 | DMD |
| 4690 | UGUUUGAGCU | | mU*mG*mU*mU*fU*fG*fA*fG*fC*fU | | XXXXXXXXX | | |
| WV- | UUACUCUGCA | 835 | fU*fU*fA*fC*fU*fC*mU*mG*mC*mA* | 1587 | XXXXXXXXXX | DMD mouse Exon23 | DMD |
| 4691 | UUGUUUGAGC | | mU*mU*mG*mU*fU*fU*fG*fA*fG*fC | | XXXXXXXXX | | |
| WV- | CUUACUCUGCA | 836 | fC*fU*fU*fA*fC*fU*mC*mU*mG*mC* | 1588 | XXXXXXXXXX | DMD mouse Exon23 | DMD |
| 4692 | UUGUUUGAG | | mA*mU*mU*mG*fU*fU*fU*fG*fA*fG | | XXXXXXXXX | | |
| WV- | UCUUACUCUGC | 837 | fU*fC*fU*fU*fA*fC*mU*mC*mU*mG* | 1589 | XXXXXXXXXX | DMD mouse Exon23 | DMD |
| 4693 | AUUGUUUGA | | mC*mA*mU*mU*fG*fU*fU*fU*fG*fA | | XXXXXXXXX | | |
| WV- | AUCUUACUCU | 838 | fA*fU*fC*fU*fU*fA*mC*mU*mC*mU* | 1590 | XXXXXXXXXX | DMD mouse Exon23 | DMD |
| 4694 | GCAUUGUUUG | | mG*mC*mA*mU*fU*fG*fU*fU*fU*fG | | XXXXXXXXX | | |
| WV- | AAUCUUACUC | 839 | fA*fA*fU*fC*fU*fU*mA*mC*mU*mC* | 1591 | XXXXXXXXXX | DMD mouse Exon23 | DMD |
| 4695 | UGCAUUGUUU | | mU*mG*mC*mA*fU*fU*fG*fU*fU*fU | | XXXXXXXXX | | |
| WV- | CAAAUCUUAC | 840 | fC*fA*fA*fA*fU*fC*mU*mU*mA*mC* | 1592 | XXXXXXXXXX | DMD mouse Exon23 | DMD |
| 4696 | UCUGCAUUGU | | mU*mC*mU*mG*fC*fA*fU*fU*fG*fU | | XXXXXXXXX | | |
| WV- | GAUACAAAUC | 841 | fG*fA*fU*fA*fC*fA*mA*mA*mU*mC | 1593 | XXXXXXXXXX | DMD mouse Exon23 | DMD |
| 4697 | UUACUCUGCA | | *mU*mU*mA*mC*fU*fC*fU*fG*fC*fA | | XXXXXXXXX | | |
| WV- | GGGUCAGCT | 842 | mG*mG*mG*mU*mC*A*G*C*T*G* | 1594 | XXXXXXXXX | ASO1 Malat1 2OMe | Malat1 |
| 2559 | GCCAATGCU | | C*C*A*A*T*mG*mC*mU*mA*mG | | XXXXXXXXXX | 5-10-5 Full PS version | |
| | AG | | | | | | |
| WV- | GGGUCAGCT | 843 | mG*mGmGmUmC*A*G*C*T*G*C*C | 1595 | XOOOXXXXX | ASO1 Malat1 2OMe | Malat1 |
| 2560 | GCCAATGCU | | *A*A*T*mGmCmUmA*mG | | XXXXXXOOOX | 5-10-5 WV-1497 like | |
| | AG | | | | | version | |
| WV- | GGGUCAGCT | 844 | mG*G*mG*mU*mC*A*G*C*T*G*C* | 1596 | XXXXXXXXX | ASO1 Malat1 2OMe | Malat1 |
| 2562 | GCCAATGCU | | C*A*A*T*mG*mC*mU*A*mG | | XXXXXXXXXX | 1-1-3-10-3-1-1 Full PS | |
| | AG | | | | | version Frank2 | |
| WV- | GGGUCAGCT | 845 | mG*G*mGmUmC*A*G*C*T*G*C*C | 1597 | XXOOXXXXX | ASO1 Malat1 2OMe | Malat1 |
| 2564 | GCCAATGCU | | *A*A*T*mGmCmUA*mG | | XXXXXXOOOX | 1-1-3-10-3-1-1 PO PS | |
| | AG | | | | | Frank2 | |
| WV- | GGGUCAGCT | 846 | mG*mG*G*mU*mC*A*G*C*T*G*C* | 1598 | XXXXXXXXX | ASO1 Malat1 2OMe | Malat1 |
| 2566 | GCCAATGCTAG | | C*A*A*T*mG*mC*T*mA*mG | | XXXXXXXXXX | 2-1-2-10-2-1-2 Full PS | |
| | | | | | | version Frank3 | |
| WV- | GGGUCAGCT | 847 | mG*mGG*mUmC*A*G*C*T*G*C*C | 1599 | XOXOXXXXX | ASO1 Malat1 2OMe | Malat1 |
| 2568 | GCCAATGCTAG | | *A*A*T*mGmCT*mA*mG | | XXXXXXOOXX | 2-1-2-10-2-1-2 PO PS | |
| | | | | | | version Frank3 | |
| WV- | GGGTCAGCTG | 848 | mG*mG*mG*T*mC*A*G*C*T*G*C* | 1600 | XXXXXXXXX | ASO1 Malat1 2OMe | Malat1 |
| 2570 | CCAATGCUAG | | C*A*A*T*mG*C*mU*mA*mG | | XXXXXXXXXX | 3-1-1-10-1-1-3 Full PS | |
| | | | | | | version Nenad1 | |
| WV- | GGGTCAGCTG | 849 | mG*mGmGT*mC*A*G*C*T*G*C*C* | 1601 | XOOXXXXXX | ASO1 Malat1 2OMe | Malat1 |
| 2572 | CCAATGCUAG | | A*A*T*mGC*mUmA*mG | | XXXXXXOXOX | 3-1-1-10-1-1-3 PO PS | |
| | | | | | | like version Nenad1 | |
| WV- | GGGUCAGCT | 850 | G*G*mG*mU*mC*A*G*C*T*G*C*C | 1602 | XXXXXXXXX | ASO1 Malat1 2OMe | Malat1 |
| 2574 | GCCAATGCU | | *A*A*T*mG*mC*mU*A*G | | XXXXXXXXX | 2-3-10-3-2 PO PS like | |
| | AG | | | | | version Chandra1 | |
| WV- | GGGUCAGCT | 851 | G*mGmGmUmC*A*G*C*T*G*C*C* | 1603 | XOOOXXXXX | ASO1 Malat1 2OMe | Malat1 |
| 2576 | GCCAATGCU | | A*A*T*mGmCmUmA*G | | XXXXXXOOOX | 1-4-10-4-1 PO PS like | |
| | AG | | | | | version Chandra2 | |
| WV- | GGGTCAGCTG | 852 | Geo*Geo*Geo*Teo*m5Ceo*A*G*C*T | 1604 | XXXXXXXXX | Randomer for WV- | Malat1 |
| 2735 | CCAATGCTAG | | *G*C*C*A*A*T*Geo*m5Ceo*Teo*A | | XXXXXXXXXX | 2526 | |
| | | | eo*Geo | | | | |
| WV- | GGGTCAGCTG | 853 | Geo*Geo*Geo*Teo*Ceo*A*G*C*T*G | 1605 | XXXXXXXXX | Randomer for WV- | Malat1 |
| 2736 | CCAATGCTAG | | *C*C*A*A*T*Geo*Ceo*Teo*Aeo*Geo | | XXXXXXXXXX | 2526 | |
| WV- | GGGUCAGCT | 854 | Mod013L001*mG*mG*mG*mU*mC* | 1606 | OXXXXXXXX | Laurie acid OMe full- | Malat1 |
| 2753 | GCCAATGCU | | A*G*C*T*G*C*C*A*A*T*mG*mC* | | XXXXXXXXX | PS | |
| | AG | | mU*mA*mG | | XXX | | |
| WV- | GGGUCAGCT | 855 | Mod014L001*mG*mG*mG*mU*mC* | 1607 | OXXXXXXXX | Myristic acid OMe | Malat1 |
| 2754 | GCCAATGCU | | A*G*C*T*G*C*C*A*A*T*mG*mC* | | XXXXXXXXX | full-PS | |
| | AG | | mU*mA*mG | | XXX | | |
| WV- | GGGUCAGCT | 856 | Mod005L001*mG*mG*mG*mU*mC* | 1608 | OXXXXXXXX | Palmitic acid OMe | Malat1 |
| 2755 | GCCAATGCU | | A*G*C*T*G*C*C*A*A*T*mG*mC* | | XXXXXXXXX | full-PS | |
| | AG | | mU*mA*mG | | XXX | | |
| WV- | GGGUCAGCT | 857 | Mod015L001*mG*mG*mG*mU*mC* | 1609 | OXXXXXXXX | Stearic acid OMe full- | Malat1 |
| 2756 | GCCAATGCU | | A*G*C*T*G*C*C*A*A*T*mG*mC* | | XXXXXXXXX | PS | |
| | AG | | mU*mA*mG | | XXX | | |
| WV- | GGGUCAGCT | 858 | Mod016L001*mG*mG*mG*mU*mC* | 1610 | OXXXXXXXX | Oleic acid OMe full- | Malat1 |
| 2757 | GCCAATGCU | | A*G*C*T*G*C*C*A*A*T*mG*mC* | | XXXXXXXXX | PS | |
| | AG | | mU*mA*mG | | XXX | | |
| WV- | GGGUCAGCT | 859 | Mod017L001*mG*mG*mG*mU*mC* | 1611 | OXXXXXXXX | Linoleic acid OMe | Malat1 |
| 2758 | GCCAATGCU | | A*G*C*T*G*C*C*A*A*T*mG*mC* | | XXXXXXXXX | full-PS | |
| | AG | | mU*mA*mG | | XXX | | |
| WV- | GGGUCAGCT | 860 | Mod018L001*mG*mG*mG*mU*mC* | 1612 | OXXXXXXXX | alpha-Linolenic acid | Malat1 |
| 2759 | GCCAATGCU | | A*G*C*T*G*C*C*A*A*T*mG*mC* | | XXXXXXXXX | OMe full-PS | |
| | AG | | mU*mA*mG | | XXX | | |
| WV- | GGGUCAGCT | 861 | Mod019L001*mG*mG*mG*mU*mC* | 1613 | OXXXXXXXX | gamma-Linolenic acid | Malat1 |
| 2760 | GCCAATGCU | | A*G*C*T*G*C*C*A*A*T*mG*mC* | | XXXXXXXXX | OMe full-PS | |
| | AG | | mU*mA*mG | | XXX | | |
| WV- | GGGUCAGCT | 862 | Mod006L001*mG*mG*mG*mU*mC* | 1614 | OXXXXXXXX | DHA OMe full-PS | Malat1 |
| 2761 | GCCAATGCU | | A*G*C*T*G*C*C*A*A*T*mG*mC* | | XXXXXXXXX | | |
| | AG | | mU*mA*mG | | XXX | | |
| WV- | GGGUCAGCT | 863 | Mod020L001*mG*mG*mG*mU*mC* | 1615 | OXXXXXXXX | Turbinaric acid OMe | Malat1 |
| 2762 | GCCAATGCU | | A*G*C*T*G*C*C*A*A*T*mG*mC* | | XXXXXXXXX | full-PS | |
| | AG | | mU*mA*mG | | XXX | | |
| WV- | GGGUCAGCT | 864 | Mod021*mG*mG*mG*mU*mC*A*G* | 1616 | XXXXXXXXX | Dilinoleyl alcohol | Malat1 |
| 2763 | GCCAATGCU | | C*T*G*C*C*A*A*T*mG*mC*mU*m | | XXXXXXXXX | OMe full-PS | |
| | AG | | A*mG | | XX | | |
| WV- | GGGUCAGCT | 865 | Mod024L001*mG*mG*mG*mU*mC* | 1617 | XXXXXXXXX | Triantennary GlcNAc | Malat1 |
| 2764 | GCCAATGCU | | A*G*C*T*G*C*C*A*A*T*mG*mC* | | XXXXXXXXX | OMe full-PS | |
| | AG | | mU*mA*mG | | XX | | |
| WV- | GGGUCAGCT | 866 | Mod025L001*mG*mG*mG*mU*mC* | 1618 | XXXXXXXXX | Triantennary beta- | Malat1 |
| 2765 | GCCAATGCU | | A*G*C*T*G*C*C*A*A*T*mG*mC* | | XXXXXXXXX | Mannose OMe full-PS | |
| | AG | | mU*mA*mG | | XX | | |
| WV- | GGGUCAGCT | 867 | Mod026L001*mG*mG*mG*mU*mC* | 1619 | XXXXXXXXX | Triantennary alpha- | Malat1 |
| 2766 | GCCAATGCU | | A*G*C*T*G*C*C*A*A*T*mG*mC* | | XXXXXXXXX | Mannose OMe full-PS | |
| | AG | | mU*mA*mG | | XX | | |
| WV- | GGGUCAGCT | 868 | Mod013L001*mG*mGmGmUmC*A* | 1620 | OXXOOOXXX | Laurie acid OMe | Malat1 |
| 2767 | GCCAATGCU | | G*C*T*G*C*C*A*A*T*mGmCmUm | | XXXXXXXXO | PS\/PO wing | |
| | AG | | A*mG | | OOX | | |
| WV- | GGGUCAGCT | 869 | Mod014L001*mG*mGmGmUmC*A* | 1621 | OXXOOOXXX | Myristic acid OMe | Malat1 |
| 2768 | GCCAATGCU | | G*C*T*G*C*C*A*A*T*mGmCmUm | | XXXXXXXXO | PS\/PO wing | |
| | AG | | A*mG | | OOX | | |
| WV- | GGGUCAGCT | 870 | Mod005L001*mG*mGmGmUmC*A* | 1622 | OXXOOOXXX | Palmitic acid OMe | Malat1 |
| 2769 | GCCAATGCU | | G*C*T*G*C*C*A*A*T*mGmCmUm | | XXXXXXXXO | PS\/PO wing | |
| | AG | | A*mG | | OOX | | |
| WV- | GGGUCAGCT | 871 | Mod015L001*mG*mGmGmUmC*A* | 1623 | OXXOOOXXX | Stearic acid OMe | Malat1 |
| 2770 | GCCAATGCU | | G*C*T*G*C*C*A*A*T*mGmCmUm | | XXXXXXXXO | PS\/PO wing | |
| | AG | | A*mG | | OOX | | |
| WV- | GGGUCAGCT | 872 | Mod016L001*mG*mGmGmUmC*A* | 1624 | OXXOOOXXX | Oleic acid OMe | Malat1 |
| 2771 | GCCAATGCU | | G*C*T*G*C*C*A*A*T*mGmCmUm | | XXXXXXXXO | PS\/PO wing | |
| | AG | | A*mG | | OOX | | |
| WV- | GGGUCAGCT | 873 | Mod017L001*mG*mGmGmUmC*A* | 1625 | OXXOOOXXX | Linoleic acid OMe | Malat1 |
| 2772 | GCCAATGCU | | G*C*T*G*C*C*A*A*T*mGmCmUm | | XXXXXXXXO | PS\/PO wing | |
| | AG | | A*mG | | OOX | | |
| WV- | GGGUCAGCT | 874 | Mod018L001*mG*mGmGmUmC*A* | 1626 | OXXOOOXXX | alpha-Linolenic acid | Malat1 |
| 2773 | GCCAATGCU | | G*C*T*G*C*C*A*A*T*mGmCmUm | | XXXXXXXXO | OMe PS\/PO wing | |
| | AG | | A*mG | | OOX | | |
| WV- | GGGUCAGCT | 875 | Mod019L001*mG*mGmGmUmC*A* | 1627 | OXXOOOXXX | gamma-Linolenic acid | Malat1 |
| 2774 | GCCAATGCU | | G*C*T*G*C*C*A*A*T*mGmCmUm | | XXXXXXXXO | OMe PS\/PO wing | |
| | AG | | A*mG | | OOX | | |
| WV- | GGGUCAGCT | 876 | Mod006L001*mG*mGmGmUmC*A* | 1628 | OXXOOOXXX | DHA OMe PS\/PO | Malat1 |
| 2775 | GCCAATGCU | | G*C*T*G*C*C*A*A*T*mGmCmUm | | XXXXXXXXO | wing | |
| | AG | | A*mG | | OOX | | |
| WV- | GGGUCAGCT | 877 | Mod020L001*mG*mGmGmUmC*A* | 1629 | OXXOOOXXX | Turbinaric acid OMe | Malat1 |
| 2776 | GCCAATGCU | | G*C*T*G*C*C*A*A*T*mGmCmUm | | XXXXXXXXO | PS\/PO wing | |
| | AG | | A*mG | | OOX | | |
| WV- | GGGUCAGCT | 878 | Mod021*mG*mGmGmUmC*A*G*C* | 1630 | XXOOOXXXX | Dilinoleyl alcohol | Malat1 |
| 2777 | GCCAATGCU | | T*G*C*C*A*A*T*mGmCmUmA*mG | | XXXXXXXOO | OMe PS\/PO wing | |
| | AG | | | | | OX | |
| WV- | GGGUCAGCT | 879 | Mod024L001*mG*mGmGmUmC*A* | 1631 | XXOOOXXXX | Triantennary GlcNAc | Malat1 |
| 2778 | GCCAATGCU | | G*C*T*G*C*C*A*A*T*mGmCmUm | | XXXXXXXOO | OMe PS\/PO wing | |
| | AG | | A*mG | | OX | | |
| WV- | GGGUCAGCT | 880 | Mod025L001*mG*mGmGmUmC*A* | 1632 | XXOOOXXXX | Triantennary beta- | Malat1 |
| 2779 | GCCAATGCU | | G*C*T*G*C*C*A*A*T*mGmCmUm | | XXXXXXXOO | Mannose OMe PS\/PO | |
| | AG | | A*mG | | OX | wing | |
| WV- | GGGUCAGCT | 881 | Mod026L001*mG*mGmGmUmC*A* | 1633 | XXOOOXXXX | Triantennary alpha- | Malat1 |
| 2780 | GCCAATGCU | | G*C*T*G*C*C*A*A*T*mGmCmUm | | XXXXXXXOO | Mannose OMe PS\/PO | |
| | AG | | A*mG | | OX | wing | |
| WV- | CUAGCAUUG | 882 | rCrUrArGrCrArUrUrGrGrCrArGrCrUr | 1634 | OOOOOOOOO | complementary RNA | Malat1 |
| 2781 | GCAGCUGAC | | GrArCrCrC | | OOOOOOOOOO | coding Malat1 | |
| | CC | | | | | | |
| WV- | GGGTCAGCTG | 883 | L001*Geo*Geo*Geo*Teo*m5Ceo*A* | 1635 | XXXXXXXXX | C6amine linker MOE | Malat1 |
| 2809 | CCAATGCTAG | | G*C*T*G*C*C*A*A*T*Geo*m5Ceo* | | XXXXXXXXX | full-PS | |
| | | | Teo*Aeo*Geo | | XX | | |
| WV- | GGGUCAGCT | 884 | L001*mG*mG*mG*mU*mC*A*G*C* | 1636 | XXXXXXXXX | C6amine linker OMe | Malat1 |
| 2810 | GCCAATGCU | | T*G*C*C*A*A*T*mG*mC*mU*mA* | | XXXXXXXXX | full-PS | |
| | AG | | mG | | XX | | |
| WV- | GGGUCAGCT | 885 | L001*mG*mGmGmUmC*A*G*C*T* | 1637 | XXOOOXXXX | C6amine linker OMe | Malat1 |
| 2811 | GCCAATGCU | | G*C*C*A*A*T*mGmCmUmA*mG | | XXXXXXXOO | PS\/PO wing | |
| | AG | | | | OX | | |
| WV- | GGGTCAGCTG | 886 | Mod013L001*Geo*Geo*Geo*Teo*m5 | 1638 | OXXXXXXXX | Lauric acid MOE full- | Malat1 |
| 2821 | CCAATGCTAG | | Ceo*A*G*C*T*G*C*C*A*A*T*Geo* | | XXXXXXXXX | PS | |
| | | | m5Ceo*Teo*Aeo*Geo | | XXX | | |
| WV- | GGGTCAGCTG | 887 | Mod014L001*Geo*Geo*Geo*Teo*m5 | 1639 | OXXXXXXXX | Myristic acid MOE | Malat1 |
| 2822 | CCAATGCTAG | | Ceo*A*G*C*T*G*C*C*A*A*T*Geo* | | XXXXXXXXX | full-PS | |
| | | | m5Ceo*Teo*Aeo*Geo | | XXX | | |
| WV- | GGGTCAGCTG | 888 | Mod005L001*Geo*Geo*Geo*Teo*m5 | 1640 | OXXXXXXXX | Palmitic acid MOE | Malat1 |
| 2823 | CCAATGCTAG | | Ceo*A*G*C*T*G*C*C*A*A*T*Geo* | | XXXXXXXXX | full-PS | |
| | | | m5Ceo*Teo*Aeo*Geo | | XXX | | |
| WV- | GGGTCAGCTG | 889 | Mod015L001*Geo*Geo*Geo*Teo*m5 | 1641 | OXXXXXXXX | Stearic acid MOE full- | Malat1 |
| 2824 | CCAATGCTAG | | Ceo*A*G*C*T*G*C*C*A*A*T*Geo* | | XXXXXXXXX | PS | |
| | | | m5Ceo*Teo*Aeo*Geo | | XXX | | |
| WV- | GGGTCAGCTG | 890 | Mod016L001*Geo*Geo*Geo*Teo*m5 | 1642 | OXXXXXXXX | Oleic acid MOE full- | Malat1 |
| 2825 | CCAATGCTAG | | Ceo*A*G*C*T*G*C*C*A*A*T*Geo* | | XXXXXXXXX | PS | |
| | | | m5Ceo*Teo*Aeo*Geo | | XXX | | |
| WV- | GGGTCAGCTG | 891 | Mod017L001*Geo*Geo*Geo*Teo*m5 | 1643 | OXXXXXXXX | Linoleic acid MOE | Malat1 |
| 2826 | CCAATGCTAG | | Ceo*A*G*C*T*G*C*C*A*A*T*Geo* | | XXXXXXXXX | full-PS | |
| | | | m5Ceo*Teo*Aeo*Geo | | XXX | | |
| WV- | GGGTCAGCTG | 892 | Mod018L001*Geo*Geo*Geo*Teo*m5 | 1644 | OXXXXXXXX | alpha-Linolenic acid | Malat1 |
| 2827 | CCAATGCTAG | | Ceo*A*G*C*T*G*C*C*A*A*T*Geo* | | XXXXXXXXX | MOE full-PS | |
| | | | m5Ceo*Teo*Aeo*Geo | | XXX | | |
| WV- | GGGTCAGCTG | 893 | Mod019L001*Geo*Geo*Geo*Teo*m5 | 1645 | OXXXXXXXX | gamma-Linolenic acid | Malat1 |
| 2828 | CCAATGCTAG | | Ceo*A*G*C*T*G*C*C*A*A*T*Geo* | | XXXXXXXXX | MOE full-PS | |
| | | | m5Ceo*Teo*Aeo*Geo | | XXX | | |
| WV- | GGGTCAGCTG | 894 | Mod006L001*Geo*Geo*Geo*Teo*m5 | 1646 | OXXXXXXXX | DHA MOE full-PS | Malat1 |
| 2829 | CCAATGCTAG | | Ceo*A*G*C*T*G*C*C*A*A*T*Geo* | | XXXXXXXXX | | |
| | | | m5Ceo*Teo*Aeo*Geo | | XXX | | |
| WV- | GGGTCAGCTG | 895 | Mod020L001*Geo*Geo*Geo*Teo*m5 | 1647 | OXXXXXXXX | Turbinaric acid MOE | Malat1 |
| 2830 | CCAATGCTAG | | Ceo*A*G*C*T*G*C*C*A*A*T*Geo* | | XXXXXXXXX | full-PS | |
| | | | m5Ceo*Teo*Aeo*Geo | | XXX | | |
| WV- | GGGTCAGCTG | 896 | Mod021*Geo*Geo*Geo*Teo*m5Ceo* | 1648 | XXXXXXXXX | Dilinoleyl alcohol | Malat1 |
| 2831 | CCAATGCTAG | | A*G*C*T*G*C*C*A*A*T*Geo*m5C | | XXXXXXXXX | MOE full-PS | |
| | | | eo*Teo*Aeo*Geo | | XX | | |
| WV- | GGGTCAGCTG | 897 | Mod024L001*Geo*Geo*Geo*Teo*m5 | 1649 | XXXXXXXXX | Triantennary GlcNAc | Malat1 |
| 2832 | CCAATGCTAG | | Ceo*A*G*C*T*G*C*C*A*A*T*Geo* | | XXXXXXXXX | MOE full-PS | |
| | | | m5Ceo*Teo*Aeo*Geo | | XX | | |
| WV- | GGGTCAGCTG | 898 | Mod025L001*Geo*Geo*Geo*Teo*m5 | 1650 | XXXXXXXXX | Triantennary beta- | Malat1 |
| 2833 | CCAATGCTAG | | Ceo*A*G*C*T*G*C*C*A*A*T*Geo* | | XXXXXXXXX | Mannose MOE full-PS | |
| | | | m5Ceo*Teo*Aeo*Geo | | XX | | |
| WV- | GGGTCAGCTG | 899 | Mod026L001*Geo*Geo*Geo*Teo*m5 | 1651 | XXXXXXXXX | Triantennary alpha- | Malat1 |
| 2834 | CCAATGCTAG | | Ceo*A*G*C*T*G*C*C*A*A*T*Geo* | | XXXXXXXXX | Mannose MOE full-PS | |
| | | | m5Ceo*Teo*Aeo*Geo | | XX | | |
| WV- | GGGTCAGCTG | 900 | Mod027L001*Geo*Geo*Geo*Teo*m5 | 1652 | XXXXXXXXX | sulfonamide MOE | Malat1 |
| 2835 | CCAATGCTAG | | Ceo*A*G*C*T*G*C*C*A*A*T*Geo* | | XXXXXXXXX | full-PS | |
| | | | m5Ceo*Teo*Aeo*Geo | | XX | | |
| WV- | GGGTCAGCTG | 901 | Mod028L001*Geo*Geo*Geo*Teo*m5 | 1653 | XXXXXXXXX | sulfonamide | Malat1 |
| 2836 | CCAATGCTAG | | Ceo*A*G*C*T*G*C*C*A*A*T*Geo* | | XXXXXXXXX | alkylchain MOE full- | |
| | | | m5Ceo*Teo*Aeo*Geo | | XX | PS | |
| WV- | GGGTCAGCTG | 902 | Mod015L001*Geo*Geo*Geo*Teo*m5 | 1654 | OXXXXXXXX | Stearic acid and | Malat1 |
| 3062 | CCAATGCTAG | | Ceo*A*G*C*T*G*C*C*A*A*T*Geo* | | XXXXXXXXX | GlucNAc, MOE, full- | |
| | | | m5Ceo*Teo*Aeo*Geo*L004Mod024 | | XXX | PS | |
| WV- | GGGTCAGCTG | 903 | Mod019L001*Geo*Geo*Geo*Teo*m5 | 1655 | OXXXXXXXX | gamma-Linolenic acid | Malat1 |
| 3063 | CCAATGCTAG | | Ceo*A*G*C*T*G*C*C*A*A*T*Geo* | | XXXXXXXXX | and GlucNAc, MOE, | |
| | | | m5Ceo*Teo*Aeo*Geo*L004Mod024 | | XXX | full-PS | |
| WV- | GGGTCAGCTG | 904 | Mod020L001*Geo*Geo*Geo*Teo*m5 | 1656 | OXXXXXXXX | Turbinaric acid and | Malat1 |
| 3064 | CCAATGCTAG | | Ceo*A*G*C*T*G*C*C*A*A*T*Geo* | | XXXXXXXXX | GlucNAc, MOE, full- | |
| | | | m5Ceo*Teo*Aeo*Geo*L004Mod024 | | XXX | PS | |
| WV- | GGGTCAGCTG | 905 | Mod015L001*Geo*Geo*Geo*Teo*m5 | 1657 | OXXXXXXXX | Stearic acid and | Malat1 |
| 3065 | CCAATGCTAG | | Ceo*A*G*C*T*G*C*C*A*A*T*Geo* | | XXXXXXXXX | Mannose, MOE, full- | |
| | | | m5Ceo*Teo*Aeo*Geo*L004Mod026 | | XXX | PS | |
| WV- | GGGTCAGCTG | 906 | Mod019L001*Geo*Geo*Geo*Teo*m5 | 1658 | OXXXXXXXX | gamma-Linolenic acid | Malat1 |
| 3066 | CCAATGCTAG | | Ceo*A*G*C*T*G*C*C*A*A*T*Geo* | | XXXXXXXXX | and Mannose, MOE, | |
| | | | m5Ceo*Teo*Aeo*Geo*L004Mod026 | | XXX | full-PS | |
| WV- | GGGTCAGCTG | 907 | Mod020L001*Geo*Geo*Geo*Teo*m5 | 1659 | OXXXXXXXX | Turbinaric acid and | Malat1 |
| 3067 | CCAATGCTAG | | Ceo*A*G*C*T*G*C*C*A*A*T*Geo* | | XXXXXXXXX | Mannose, MOE, full- | |
| | | | m5Ceo*Teo*Aeo*Geo*L004Mod026 | | XXX | PS | |
| WV- | UAGCGCCCA | 908 | mU*mA*mG*mC*mG*C*C*C*A*C* | 1660 | XXXXXXXXX | 20mers, Full PS, 5-10- | Malat1 |
| 3154 | CCTCACCCCUC | | C*T*C*A*C*mC*mC*mC*mU*mC | | XXXXXXXXXX | 5 2′OMe gapmers | |
| WV- | UUAGCGCCC | 909 | mU*mU*mA*mG*mC*G*C*C*C*A* | 1661 | XXXXXXXXX | 20mers, Full PS, 5-10- | Malat1 |
| 3155 | ACCTCACCCCU | | C*C*T*C*A*mC*mC*mC*mC*mU | | XXXXXXXXXX | 5 2′OMe gapmers | |
| WV- | CUUAGCGCC | 910 | mC*mU*mU*mA*mG*C*G*C*C*C* | 1662 | XXXXXXXXX | 20mers, Full PS, 5-10- | Malat1 |
| 3156 | CACCTCACCCC | | A*C*C*T*C*mA*mC*mC*mC*mC | | XXXXXXXXXX | 5 2′OMe gapmers | |
| WV- | ACCCCGTCCT | 911 | mA*mC*mC*mC*mC*G*T*C*C*T*G | 1663 | XXXXXXXXX | 20mers, Full PS, 5-10- | Malat1 |
| 3157 | GGAAACCAGG | | *G*A*A*A*mC*mC*mA*mG*mG | | XXXXXXXXXX | 5 2′OMe gapmers | |
| WV- | CCCCGTCCTG | 912 | mC*mC*mC*mC*mG*T*C*C*T*G*G | 1664 | XXXXXXXXX | 20mers, Full PS, 5-10- | Malat1 |
| 3158 | GAAACCAGGA | | *A*A*A*C*mC*mA*mG*mG*mA | | XXXXXXXXXX | 5 2′OMe gapmers | |
| WV- | GCUUAGCGC | 913 | mG*mC*mU*mU*mA*G*C*G*C*C* | 1665 | XXXXXXXXX | 20mers, Full PS, 5-10- | Malat1 |
| 3159 | CCACCTCACCC | | C*A*C*C*T*mC*mA*mC*mC*mC | | XXXXXXXXXX | 5 2′OMe gapmers | |
| WV- | GGCUUAGCG | 914 | mG*mG*mC*mU*mU*A*G*C*G*C* | 1666 | XXXXXXXXX | 20mers, Full PS, 5-10- | Malat1 |
| 3160 | CCCACCUCACC | | C*C*A*C*C*mU*mC*mA*mC*mC | | XXXXXXXXXX | 5 2′OMe gapmers | |
| WV- | CCCGUCCTGG | 915 | mC*mC*mC*mG*mU*C*C*T*G*G* | 1667 | XXXXXXXXX | 20mers, Full PS, 5-10- | Malat1 |
| 3161 | AAACCAGGAG | | A*A*A*C*C*mA*mG*mG*mA*mG | | XXXXXXXXXX | 5 2′OMe gapmers | |
| WV- | UGAACCCCGT | 916 | mU*mG*mA*mA*mC*C*C*C*G*T* | 1668 | XXXXXXXXX | 20mers, Full PS, 5-10- | Malat1 |
| 3162 | CCTGGAAACC | | C*C*T*G*G*mA*mA*mA*mC*mC | | XXXXXXXXXX | 5 2′OMe gapmers | |
| WV- | UUUCCCCTCC | 917 | mU*mU*mU*mC*mC*C*C*T*C*C*C | 1669 | XXXXXXXXX | 20mers, Full PS, 5-10- | Malat1 |
| 3163 | CTCATCAACA | | *T*C*A*T*mC*mA*mA*mC*mA | | XXXXXXXXXX | 5 2′OMe gapmers | |
| WV- | AGCUCCAGTC | 918 | mA*mG*mC*mU*mC*C*A*G*T*C* | 1670 | XXXXXXXXX | 20mers, Full PS, 5-10- | Malat1 |
| 3164 | CCTGAAGGUG | | C*C*T*G*A*mA*mG*mG*mU*mG | | XXXXXXXXXX | 5 2′OMe gapmers | |
| WV- | AGGCUTAGC | 919 | mA*mG*mG*mC*mU*T*A*G*C*G* | 1671 | XXXXXXXXX | 20mers, Full PS, 5-10- | Malat1 |
| 3165 | GCCCACCUCAC | | C*C*C*A*C*mC*mU*mC*mA*mC | | XXXXXXXXXX | 5 2′OMe gapmers | |
| WV- | GUUUCCCCTC | 920 | mG*mU*mU*mU*mC*C*C*C*T*C* | 1672 | XXXXXXXXX | 20mers, Full PS, 5-10- | Malat1 |
| 3166 | CCTCAUCAAC | | C*C*T*C*A*mU*mC*mA*mA*mC | | XXXXXXXXXX | 5 2′OMe gapmers | |
| WV- | AACCCCGTCC | 921 | mA*mA*mC*mC*mC*C*G*T*C*C*T | 1673 | XXXXXXXXX | 20mers, Full PS, 5-10- | Malat1 |
| 3167 | TGGAAACCAG | | *G*G*A*A*mA*mC*mC*mA*mG | | XXXXXXXXXX | 5 2′OMe gapmers | |
| WV- | GAACCCCGTC | 922 | mG*mA*mA*mC*mC*C*C*G*T*C* | 1674 | XXXXXXXXX | 20mers, Full PS, 5-10- | Malat1 |
| 3168 | CTGGAAACCA | | C*T*G*G*A*mA*mA*mC*mC*mA | | XXXXXXXXXX | 5 2′OMe gapmers | |
| WV- | GCUCCAGTCC | 923 | mG*mC*mU*mC*mC*A*G*T*C*C* | 1675 | XXXXXXXXX | 20mers, Full PS, 5-10- | Malat1 |
| 3169 | CTGAAGGUGU | | C*T*G*A*A*mG*mG*mU*mG*mU | | XXXXXXXXXX | 5 2′OMe gapmers | |
| WV- | UUGAACCCC | 924 | mU*mU*mG*mA*mA*C*C*C*C*G* | 1676 | XXXXXXXXX | 20mers, Full PS, 5-10- | Malat1 |
| 3170 | GTCCTGGAAAC | | T*C*C*T*G*mG*mA*mA*mA*mC | | XXXXXXXXXX | 5 2′OMe gapmers | |
| WV- | UUCCCCTCCC | 925 | mU*mU*mC*mC*mC*C*T*C*C*C*T | 1677 | XXXXXXXXX | 20mers, Full PS, 5-10- | Malat1 |
| 3171 | TCATCAACAA | | *C*A*T*C*mA*mA*mC*mA*mA | | XXXXXXXXXX | 5 2′OMe gapmers | |
| WV- | CCGUCCTGGA | 926 | mC*mC*mG*mU*mC*C*T*G*G*A* | 1678 | XXXXXXXXX | 20mers, Full PS, 5-10- | Malat1 |
| 3172 | AACCAGGAGU | | A*A*C*C*A*mG*mG*mA*mG*mU | | XXXXXXXXXX | 5 2′OMe gapmers | |
| WV- | GCAGCTCCAG | 927 | mG*mC*mA*mG*mC*T*C*C*A*G* | 1679 | XXXXXXXXX | 20mers, Full PS, 5-10- | Malat1 |
| 3173 | TCCCTGAAGG | | T*C*C*C*T*mG*mA*mA*mG*mG | | XXXXXXXXXX | 5 2′OMe gapmers | |
| WV- | UGCCAGGCT | 928 | mU*mG*mC*mC*mA*G*G*C*T*G* | 1680 | XXXXXXXXX | 20mers, Full PS, 5-10- | Malat1 |
| 3174 | GGTTATGACUC | | G*T*T*A*T*mG*mA*mC*mU*mC | | XXXXXXXXXX | 5 2′OMe gapmers | |
| WV- | CGUCCTGGA | 929 | mC*mG*mU*mC*mC*T*G*G*A*A* | 1681 | XXXXXXXXX | 20mers, Full PS, 5-10- | Malat1 |
| 3175 | AACCAGGAG | | A*C*C*A*G*mG*mA*mG*mU*mG | | XXXXXXXXXX | 5 2′OMe gapmers | |
| | UG | | | | | | |
| WV- | CAGCUCCAGT | 930 | mC*mA*mG*mC*mU*C*C*A*G*T* | 1682 | XXXXXXXXX | 20mers, Full PS, 5-10- | Malat1 |
| 3176 | CCCTGAAGGU | | C*C*C*T*G*mA*mA*mG*mG*mU | | XXXXXXXXXX | 5 2′OMe gapmers | |
| WV- | CUGCCAGGCT | 931 | mC*mU*mG*mC*mC*A*G*G*C*T* | 1683 | XXXXXXXXX | 20mers, Full PS, 5-10- | Malat1 |
| 3177 | GGTTAUGACU | | G*G*T*T*A*mU*mG*mA*mC*mU | | XXXXXXXXXX | 5 2′OMe gapmers | |
| WV- | UCCUGGAAA | 932 | mU*mC*mC*mU*mG*G*A*A*A*C* | 1684 | XXXXXXXXX | 20mers, Full PS, 5-10- | Malat1 |
| 3178 | CCAGGAGUG | | C*A*G*G*A*mG*mU*mG*mC*mC | | XXXXXXXXXX | 5 2′OMe gapmers | |
| | CC | | | | | | |
| WV- | AAGGCTTAGC | 933 | mA*mA*mG*mG*mC*T*T*A*G*C* | 1685 | XXXXXXXXX | 20mers, Full PS, 5-10- | Malat1 |
| 3179 | GCCCACCUCA | | G*C*C*C*A*mC*mC*mU*mC*mA | | XXXXXXXXXX | 5 2′OMe gapmers | |
| WV- | CCAGGCTGGT | 934 | mC*mC*mA*mG*mG*C*T*G*G*T*T | 1686 | XXXXXXXXX | 20mers, Full PS, 5-10- | Malat1 |
| 3180 | TATGACUCAG | | *A*T*G*A*mC*mU*mC*mA*mG | | XXXXXXXXXX | 5 2′OMe gapmers | |
| WV- | CCUGGAAAC | 935 | mC*mC*mU*mG*mG*A*A*A*C*C* | 1687 | XXXXXXXXX | 20mers, Full PS, 5-10- | Malat1 |
| 3181 | CAGGAGUGC | | A*G*G*A*G*mU*mG*mC*mC*mA | | XXXXXXXXXX | 5 2′OMe gapmers | |
| | CA | | | | | | |
| WV- | GCCAGGCTG | 936 | mG*mC*mC*mA*mG*G*C*T*G*G* | 1688 | XXXXXXXXX | 20mers, Full PS, 5-10- | Malat1 |
| 3182 | GTTATGACUCA | | T*T*A*T*G*mA*mC*mU*mC*mA | | XXXXXXXXXX | 5 2′OMe gapmers | |
| WV- | AAAGGCTTA | 937 | mA*mA*mA*mG*mG*C*T*T*A*G* | 1689 | XXXXXXXXX | 20mers, Full PS, 5-10- | Malat1 |
| 3183 | GCGCCCACCUC | | C*G*C*C*C*mA*mC*mC*mU*mC | | XXXXXXXXXX | 5 2′OMe gapmers | |
| WV- | GGAUUGGGA | 938 | mG*mG*mA*mU*mU*G*G*G*A*G* | 1690 | XXXXXXXXX | 20mers, Full PS, 5-10- | Malat1 |
| 3184 | GTTACTUGCCA | | T*T*A*C*T*mU*mG*mC*mC*mA | | XXXXXXXXXX | 5 2′OMe gapmers | |
| WV- | GUCCUGGAA | 939 | mG*mU*mC*mC*mU*G*G*A*A*A* | 1691 | XXXXXXXXX | 20mers, Full PS, 5-10- | Malat1 |
| 3185 | ACCAGGAGU | | C*C*A*G*G*mA*mG*mU*mG*mC | | XXXXXXXXXX | 5 2′OMe gapmers | |
| | GC | | | | | | |
| WV- | CAGGCTGGTT | 940 | mC*mA*mG*mG*mC*T*G*G*T*T* | 1692 | XXXXXXXXX | 20mers, Full PS, 5-10- | Malat1 |
| 3186 | ATGACUCAGA | | A*T*G*A*C*mU*mC*mA*mG*mA | | XXXXXXXXXX | 5 2′OMe gapmers | |
| WV- | GGGAGTTACT | 941 | mG*mG*mG*mA*mG*T*T*A*C*T*T | 1693 | XXXXXXXXX | 20mers, Full PS, 5-10- | Malat1 |
| 3187 | TGCCAACUUG | | *G*C*C*A*mA*mC*mU*mU*mG | | XXXXXXXXXX | 5 2′OMe gapmers | |
| WV- | UGGGAGTTA | 942 | mU*mG*mG*mG*mA*G*T*T*A*C* | 1694 | XXXXXXXXX | 20mers, Full PS, 5-10- | Malat1 |
| 3188 | CTTGCCAACUU | | T*T*G*C*C*mA*mA*mC*mU*mU | | XXXXXXXXXX | 5 2′OMe gapmers | |
| WV- | UUGGGAGTT | 943 | mU*mU*mG*mG*mG*A*G*T*T*A* | 1695 | XXXXXXXXX | 20mers, Full PS, 5-10- | Malat1 |
| 3189 | ACTTGCCAACU | | C*T*T*G*C*mC*mA*mA*mC*mU | | XXXXXXXXXX | 5 2′OMe gapmers | |
| WV- | AUUUCCTCA | 944 | mA*mU*mU*mU*mC*C*T*C*A*A* | 1696 | XXXXXXXXX | 20mers, Full PS, 5-10- | Malat1 |
| 3190 | ACACTCAGCCU | | C*A*C*T*C*mA*mG*mC*mC*mU | | XXXXXXXXXX | 5 2′OMe gapmers | |
| WV- | CCCCUCCCTC | 945 | mC*mC*mC*mC*mU*C*C*C*T*C*A | 1697 | XXXXXXXXX | 20mers, Full PS, 5-10- | Malat1 |
| 3191 | ATCAACAAAA | | *T*C*A*A*mC*mA*mA*mA*mA | | XXXXXXXXXX | 5 2′OMe gapmers | |
| WV- | ACAUUTCCAC | 946 | mA*mC*mA*mU*mU*T*C*C*A*C* | 1698 | XXXXXXXXX | 20mers, Full PS, 5-10- | Malat1 |
| 3192 | TTGCCAGUUA | | T*T*G*C*C*mA*mG*mU*mU*mA | | XXXXXXXXXX | 5 2′OMe gapmers | |
| WV- | AAAAGGCTT | 947 | mA*mA*mA*mA*mG*G*C*T*T*A* | 1699 | XXXXXXXXX | 20mers, Full PS, 5-10- | Malat1 |
| 3193 | AGCGCCCACCU | | G*C*G*C*C*mC*mA*mC*mC*mU | | XXXXXXXXXX | 5 2′OMe gapmers | |
| WV- | ACCUGTCTGA | 948 | mA*mC*mC*mU*mG*T*C*T*G*A* | 1700 | XXXXXXXXX | 20mers, Full PS, 5-10- | Malat1 |
| 3194 | GGCAAACGAA | | G*G*C*A*A*mA*mC*mG*mA*mA | | XXXXXXXXXX | 5 2′OMe gapmers | |
| WV- | AUUGGGAGT | 949 | mA*mU*mU*mG*mG*G*A*G*T*T* | 1701 | XXXXXXXXX | 20mers, Full PS, 5-10- | Malat1 |
| 3195 | TACTTGCCAAC | | A*C*T*T*G*mC*mC*mA*mA*mC | | XXXXXXXXXX | 5 2′OMe gapmers | |
| WV- | UCAACAAAA | 950 | mU*mC*mA*mA*mC*A*A*A*A*G* | 1702 | XXXXXXXXX | 20mers, Full PS, 5-10- | Malat1 |
| 3196 | GCCCACCCUCU | | C*C*C*A*C*mC*mC*mU*mC*mU | | XXXXXXXXXX | 5 2′OMe gapmers | |
| WV- | CUAAGATGCT | 951 | mC*mU*mA*mA*mG*A*T*G*C*T* | 1703 | XXXXXXXXX | 20mers, Full PS, 5-10- | Malat1 |
| 3197 | AGCTTGGCCA | | A*G*C*T*T*mG*mG*mC*mC*mA | | XXXXXXXXXX | 5 2′OMe gapmers | |
| WV- | GGGTCAGCTG | 952 | L001Geo*Geo*Geo*Teo*m5Ceo*A*G | 1704 | OXXXXXXXX | C6 amine PO linker, | Malat1 |
| 3356 | CCAATGCTAG | | *C*T*G*C*C*A*A*T*Geo*m5Ceo*T | | XXXXXXXXX | MOE, full-PS | |
| | | | eo*Aeo*Geo | | XX | | |
| WV- | GGGTCAGCTG | 953 | Mod030Geo*Geo*Geo*Teo*m5Ceo*A | 1705 | OXXXXXXXX | WV-2735 based; with | Malat1 |
| 3521 | CCAATGCTAG | | *G*C*T*G*C*C*A*A*T*Geo*m5Ceo | | XXXXXXXXX | PO linker, Laurie acid | |
| | | | *Teo*Aeo*Geo | | XX | | |
| WV- | GGGTCAGCTG | 954 | Mod031Geo*Geo*Geo*Teo*m5Ceo*A | 1706 | OXXXXXXXX | WV-2735 based; with | Malat1 |
| 3522 | CCAATGCTAG | | *G*C*T*G*C*C*A*A*T*Geo*m5Ceo | | XXXXXXXXX | PO inker, Myristic | |
| | | | *Teo*Aeo*Geo | | XX | acid | |
| WV- | GGGTCAGCTG | 955 | Mod032Geo*Geo*Geo*Teo*m5Ceo*A | 1707 | OXXXXXXXX | WV-2735 based; with | Malat1 |
| 3523 | CCAATGCTAG | | *G*C*T*G*C*C*A*A*T*Geo*m5Ceo | | XXXXXXXXX | PO linker, Palmitic | |
| | | | *Teo*Aeo*Geo | | XX | acid | |
| WV- | GGGTCAGCTG | 956 | Mod033Geo*Geo*Geo*Teo*m5Ceo*A | 1708 | OXXXXXXXX | WV-2735 based; with | Malat1 |
| 3524 | CCAATGCTAG | | *G*C*T*G*C*C*A*A*T*Geo*m5Ceo | | XXXXXXXXX | PO linker, Stearic acid | |
| | | | *Teo*Aeo*Geo | | XX | | |

¹Including —C(O)— (noted as O) connecting Mod and the amino group of C6 amino linker and phosphate or phosphorothioate linkage connecting C6 amino linker and oligonucleotide chain (noted as X (stereorandom), S (Sp) or R (Sp)).

### Abbreviations:

[1562] 2\′: 2′

### 5Ceo: 5-Methyl 2′-Methoxyethyl C

[1563] C6: C6 amino linker (L001, —NH—(CH₂)₆— wherein —NH— is connected to Mod (through —C(O)—) or —H, and —(CH₂)₆— is connected to the 5′-end of oligonucleotide chain through, e.g., phosphodiester (illustrated in the Table as O or PO), phosphorothioate (illustrated in the Table as * if the phosphorothioate not chirally controlled; *S, S, or Sp, if chirally controlled and has an Sp configuration, and *R, R, or Rp, if chirally controlled and has an Rp configuration), or phosphorodithioate (illustrated in the Table as PS2 or :). May also be referred to as C6 linker or C6 amine linker)

### eo: 2′-MOE

### Exon: Exon of Dystrophin

### F, f: 2′-F

[1564] Lauric (in Mod013), Myristic (in Mod014), Palmitic (in Mod005), Stearic (in Mod015), Oleic (in Mod016), Linoleic (in Mod017), alpha-Linoleinc (in Mod018), gamma-Linolenic (in Mod019), DHA (in Mod006), Turbinaric (in Mod020), Dilinoleic (in Mod021), TriGlcNAc (in Mod024), TrialphaMannose (in Mod026), MonoSulfonamide (in Mod 027), TriSulfonamide (in Mod029), Lauric (in Mod030), Myristic (in Mod031), Palmitic (in Mod032), and Stearic (in Mod033): Lauric acid (for Mod013), Myristic acid (for Mod014), Palmitic acid (for Mod005), Stearic acid (for Mod015), Oleic acid (for Mod016), Linoleic acid (for Mod017), alpha-Linolenic acid (for Mod018), gamma-Linolenic acid (for Mod019), docosahexaenoic acid (for Mod006), Turbinaric acid (for Mod020), alcohol for Dilinoleyl (for Mod021), acid for TriGlcNAc (for Mod024), acid for TrialphaMannose (for Mod026), acid for MonoSulfonamide (for Mod 027), acid for TriSulfonamide (for Mod029), Lauryl alcohol (for Mod030), Myristyl alcohol (for Mod031), Palmityl alcohol (for Mod032), and Stearyl alcohol (for Mod033), respectively, conjugated to oligonucleotide chains through amide groups, C6 amino linker, phosphodiester linkage (PO), and/or phosphorothioate linkage (PS): Mod013 (Lauric acid with C6 amino linker and PO or PS), Mod014 (Myristic acid with C6 amino linker and PO or PS), Mod005 (Palmitic acid with C6 amino linker and PO or PS), Mod015 (Stearic acid with C6 amino linker and PO or PS), Mod016 (Oleic acid with C6 amino linker and PO or PS), Mod017 (Linoleic acid with C6 amino linker and PO or PS), Mod018 (alpha-Linolenic acid with C6 amino linker and PO or PS), Mod019 (gamma-Linolenic acid with C6 amino linker and PO or PS), Mod006 (DHA with C6 amino linker and PO or PS), Mod020 (Turbinaric acid with C6 amino linker and PO or PS), Mod021 (alcohol (see below) with PO or PS), Mod024 (acid (see below) with C6 amino linker and PO or PS), Mod026 (acid (see below) with C6 amino linker and PO or PS), Mod027 (acid (see below) with C6 amino linker and PO or PS), Mod029 (acid (see below) with C6 amino linker and PO or PS), Mod030 (Lauryl alcohol with PO or PS), Mod031 (Myristyl alcohol with PO or PS), Mod032 (Palmityl alcohol with PO or PS), and Mod033 (Stearyl alcohol with PO or PS), with PO or PS for each oligonucleotide indicated in the Table (for example, WV-3473 Lauric acid conjugated to oligonucleotide chain of WV-3473 via amide group, C6, and PO:
Mod013L001fU*SfC*SfA*SfA*SfG*SfG*SmAfA*SmGmA*SfU*SmGmGfC*SfA*SfU*SfU*SfU*SfC*SfU (SEQ ID NO: 1709) (Description), OOSSSSSSOSOSSOOSSSSSS (Stereochemistry), and/or WV-3473, Lauric acid, C6 PO linker (Notes); WV-3557 Steary alcohol conjugated to oligonucleotide chain of WV-3473 via PS:
Mod033*fU*SfC*SfA*SfA*SfG*SfG*SmAfA*SmGmA*SfU*SmGmGfC*SfA*SfU*SfU*SfU*SfC*SfU (SEQ ID NO: 1710) (Description), XSSSSSSOSOSSOOSSSSSS (Stereochemistry), and/or WV-3473, Stearic PS (Notes); and WV-4106 Stearic acid conjugated to oligonucleotide chain of WV-3473 via amide group, C₆, and PS:
Mod015L001*fU*SfC*SfA*SfA*SfG*SfG*SmAfA*SmGmA*SfU*SmGmGfC*SfA*SfU*SfU*SfU*SfC*SfU (SEQ ID NO: 1711) (Description), OXSSSSSSOSOSSOOSSSSSS (Stereochemistry), and/or WV-3473, C6 PS linker, Stearic acid (Notes)) Moieties for conjugation, and example reagents (many of which were previously known and are commercially available or can be readily prepared using known technologies in accordance with the present disclosure, e.g., Lauric acid (for Mod013), Myristic acid (for Mod014), Palmitic acid (for Mod005), Stearic acid (for Mod015), Oleic acid (for Mod016), Linoleic acid (for Mod017), alpha-Linolenic acid (for Mod018), gamma-Linolenic acid (for Mod019), docosahexaenoic acid (for Mod006), Turbinaric acid (for Mod020), alcohol for Dilinoleyl (for Mod021), Lauryl alcohol (for Mod030), Myristyl alcohol (for Mod031), Palmityl alcohol (for Mod032), Stearyl alcohol (for Mod033), etc.) are listed below

### m: 2′-OMe.

[1565] NA: Not Applicable; this term is generally used for negative controls

### OMe: 2′-OMe

[1566] O, PO: phoshodiester (phosphate), or when used with Mod and L001, —C(O)— (connecting Mod and L001, for example, Mod013L001fU*SfC*SfA*SfA*SfG*SfG*SmAfA*SmGmA*SfU*SmGmGfC*SfA*SfU*SfU*SfU*SfC*SfU (SEQ ID NO: 1709) (Description), OOSSSSSSOSOSSOOSSSSSS (Stereochemistry) and/or WV-3473, Lauric acid, C₆ PO linker (Notes). Note the second O OOSSSSSSOSOSSOOSSSSSS (Stereochemistry) represents phosphodiester linkage connecting L001 and 5′-O— of oligonucleotide chain: Mod013L001fU*SfC*SfA*SfA*SfG*SfG*SmAfA*SmGmA*SfU*SmGmGfC*SfA*SfU*SfU*SfU*SfC*SfU (SEQ ID NO: 1709))

### *, PS: Phosphorothioate

[1567] PS2, ::phosphorodithioate (e.g., WV-3078, wherein a colon (:) indicates a phosphorodithioate)
*R, R, Rp: Phosphorothioate in Rp conformation
*S, S, Sp: Phosphorothioate in Sp conformation

### WV, W V-: WV-

[1568] X: Phosphorothioate stereorandom
Example moieties (e.g., lipid moieties, targeting component, etc.) and example preparation reagents (e.g., acids, alcohols, etc.) for conjugation to prepare provided oligonucleotides, e.g., example oligonucleotides in Tables 1-4 comprising such moieties, in accordance with the present disclosure include the below:

[chemical structure]

[chemical structure]

[chemical structure]

[chemical structure]

[chemical structure]

[chemical structure]

[chemical structure]

[1569] Applicant notes that presented above in the Table are example ways of presenting structures of provided oligonucleotides, for example, WV-3546 (Mod020L001fU*SfC*SfA*SfA*SfG*SfG*SmAfA*SmGmA*SfU*SmGmGfC*SfA*SfU*SfU*SfU*SfC*SfU (SEQ ID NO: 1712)) can be presented as a lipid moiety

[chemical structure]

connected via —C(O)— (QOSSSSSSOSOSSOOSSSSSS) to the —NH— of —NH—(CH₂)₆—, wherein the —(CH₂)₆— is connected to the 5′-end of the oligonucleotide chain via a phosphodiester linkage (OOSSSSSSOSOSSOOSSSSSS). One having ordinary skill in the art understands that a provided oligonucleotide can be presented as combinations of lipid, linker and oligonucleotide chain units in many different ways, wherein in each way the combination of the units provides the same oligonucleotide. For example, WV-3546, can be considered to have a structure of A^{c}-[-L^{LD}-(R^{LD})ₐ]_{b}, wherein a is 1, b is 1, and have a lipid moiety R^{LD} of

[chemical structure]

connected to its oligonucleotide chain (A^{c}) portion through a linker L^{LD} of —C(O)—NH—(CH₂)₆—OP(═O)(OH)—O—, wherein —C(O)— is connected to R^{LD} and —O— is connected to A^{c} (as 5′-O— of the oligonucleotide chain); one of the many alternative ways is that R^{LD} is

[chemical structure]

and L^{LD} is —NH—(CH₂)₆—OP(═O)(OH)—O—, wherein —NH— is connected to R^{LD}, and —O— is connected to A^{c} (as 5′-O— of the oligonucleotide chain).

[1570] Oligonucleotides were prepared and characterized using a variety of methods in accordance of the present disclosure. Example MS data are presented below:

| WAVE | Calculated | Found |
|---|---|---|
| ID | Mass | Mass |
| WV-2531 | 6767.90000 | 6766.3 |
| WV-3152 | 6743.77000 | 6742.8 |
| WV-3472 | 6720.78472 | 6720.8 |
| WV-3473 | 6732.82024 | 6735 |
| WV-3507 | 6716.75464 | 6717.3 |
| WV-3508 | 6704.71912 | 6706 |
| WV-3509 | 6716.75464 | 6718 |
| WV-3510 | 6716.75464 | 6717.6 |
| WV-3511 | 6728.79016 | 6731 |
| WV-3512 | 6700.68904 | 6702 |
| WV-3513 | 6712.72456 | 6713 |
| WV-3514 | 6688.65352 | 6688.9 |
| WV-3515 | 6700.68904 | 6701.2 |
| WV-3545 | 7178.43622 | 7178 |
| WV-3546 | 7294.59604 | 7295 |

*Calculated and found mass data of WV-2531 and WV-3152 are for sodium adducts.

[1571] In various embodiments, a composition comprises a lipid and a nucleic acid [as non-limiting examples: an oligonucleotide, an antisense oligonucleotide, an RNAi agent, a miRNA, immunomodulatory nucleic acid, an aptamer, a Piwi-interacting RNA (piRNA), a small nucleolar RNA (snoRNA), a ribozyme, a mRNA, a lncRNA, a ncRNA, an antigomir (e.g., an antagonist to a miRNA, lncRNA, ncRNA or other nucleic acid), a plasmid, or a vector, or a portion thereof] which targets any gene listed herein.

[1572] In some embodiments, a composition comprises a lipid and a nucleic acid which targets any of: AFF2, APOB, APOC3, AR, ATM, ATN1, ATXN1, ATXN10, ATXN2, ATXN3, ATXN7, ATXN80S, BACE1, BBS1, BCL2L1, BRCA1, BRCA2, C9orf72, CACNA1A, CD40, CD40, CDKN1A, CFTR, CLC1, CNBP, COL7A1, CYPI 1A, DMD, DMPK, DYSF, Dystrophin, ERBB2, F7, F9, FANCC, FGB, FGFR1, FKTN, FLT1, FMR1, FXN, GHR, GRP143, HBB, HNRNPH1, HTT (Huntingtin), IKBKAP, IL5RA, ISCU, JPH3, KDR, LMNA, MAPT, MCL1, MDM2, MLC1, MST1R, MSTN, MUT, MYC, NF1, NPC1, PCCA, PCCB, PHB, PKM, PMM2, PPP2R2B, PTCH1, PTS, PTS, RHO, RHO, RPGR, RPGR, SMN2, SRA1, STAT3, TBP, TERT, TMPRSS2, TNFRSFIB, USH1C, USP5, and WT1.

[1573] In some embodiments, the common base sequence is capable of hybridizing with a transcript in a cell. In some embodiments, a common base sequence hybridizes with a transcript of any gene described herein or known in the art.

[1574] In some embodiments, a composition comprises a lipid and a biologically active agent suitable for treatment of any of: Afibrinogenemia, Alzheimer's disease, Alzheimer's disease/FTDP-17 Taupathies, Ataxia telangiectasia, Bardet-Biedl syndrome, Beta-thalassemia, Cancer, CDG1A, Congenital adrenal insufficiency, Cystic fibrosis, Dentatorubral-pallidoluysian atrophy, Duchenne muscular dystrophy, Dystrophic epidermolysis bullosa, Factor VII deficiency, Familial dysautonomia, Fanconi anemia, FHBL/atherosclerosis, Fragile X mental retardation, Fragile X syndrome, Friedreich's ataxia, Frontotemporal dementia, Fukuyama congenital muscular dystrophy (FCMD), Growth hormone insensitivity, Hemophilia A, HPABH4A, Huntington's Diease, Huntington's Disease-like 2, Hutchinson-Gilford progeria (HGPS), Immune-response, Inflammatory disease, Influenza virus, Machado-Joseph disease, Mental retardation, Mental retardation, X-linked, associated with FRAXE, Methylmalonic aciduria, Miyoshi myopathy, MLC1, Muscle wasting diseases, Myopathy with lactic acidosis, Myotonic dystrophy, Neurofibromatosis, Niemann-Pick type C, Ocular albinism type 1, Oculpopharyngeal muscular dystrophy, Propionic acidemia, Retinitis pigmentosa, Spinal muscular atrophy, Spinocerebellar ataxia, Spinocerebellar ataxia type 1, Spinomuscular bulbar atrophy, or Usher syndrome.

[1575] In some embodiments, an antisense oligonucleotide is an oligonucleotide which participates in RNaseH-mediated cleavage; for example, an antisense oligonucleotide hybridizes in a sequence-specific manner to a portion of a target mRNA, thus targeting the mRNA for cleavage my RNaseH. In some embodiments, an antisense oligonucleotide is able to differentiate between a wild-type and a mutant allele of a target. In some embodiments, an antisense oligonucleotide significantly participates in RNaseH-mediated cleavage of a mutant allele but participates in RNaseH-mediated cleavage of a wild-type allele to a much less degree (e.g., does not significantly participate in RNaseH-mediated cleavage of the wild-type allele of the target).

[1576] In various embodiments, a composition comprises a lipid and a nucleic acid [as non-limiting examples: an oligonucleotide, an antisense oligonucleotide, an RNAi agent, a miRNA, immunomodulatory nucleic acid, an aptamer, a Piwi-interacting RNA (piRNA), a small nucleolar RNA (snoRNA), a ribozyme, a mRNA, a lncRNA, a ncRNA, an antigomir (e.g., an antagonist to a miRNA, lncRNA, ncRNA or other nucleic acid), a plasmid, or a vector, or a portion thereof] which targets Huntingtin gene.

[1577] In various embodiments, a composition comprises a lipid and a nucleic acid [as non-limiting examples: an oligonucleotide, an antisense oligonucleotide, an RNAi agent, a miRNA, immunomodulatory nucleic acid, an aptamer, a Piwi-interacting RNA (piRNA), a small nucleolar RNA (snoRNA), a ribozyme, a mRNA, a lncRNA, a ncRNA, an antigomir (e.g., an antagonist to a miRNA, lncRNA, ncRNA or other nucleic acid), a plasmid, or a vector, or a portion thereof] which targets a mutant allele of Huntingtin gene.

[1578] In various embodiments, a composition comprises a lipid and a nucleic acid [as non-limiting examples: an oligonucleotide, an antisense oligonucleotide, an RNAi agent, a miRNA, immunomodulatory nucleic acid, an aptamer, a Piwi-interacting RNA (piRNA), a small nucleolar RNA (snoRNA), a ribozyme, a mRNA, a lncRNA, a ncRNA, an antigomir (e.g., an antagonist to a miRNA, lncRNA, ncRNA or other nucleic acid), a plasmid, or a vector, or a portion thereof] which is capable of differentiating between a wild-type and a mutant allele of Huntingtin gene.

[1579] Various oligonucleotides to HTT (Huntingtin gene) are listed below, in Table 8.

TABLE 8
Example HTT Oligonucleotides.

| | | SEQ | | SEQ | | | |
|---|---|---|---|---|---|---|---|
| | | ID | | ID | | | |
| WAVE ID | Base Sequence | NO: | Description | NO: | Stereochemistry | Notes 1 | Notes 2 |
| ONT-450 | ATTAATAAATT | 1713 | A*T*T*A*A*T*A*A*A*T* | 2065 | XXXXXXXXX | Stereorandom | Htt SNP |
| | GTCATCACC | | T*G*T*C*A*T*C*A*C*C | | XXXXXXXXXX | Htt sequence | rs7685686 |
| ONT-451 | ATTAATAAATT | 1714 | A*ST*ST*SA*SA*ST*SA*S | 2066 | SSSSSSSSSSSS | Stereopure Htt | Htt SNP |
| (WV-451) | GTCATCACC | | A*SA*ST*ST*SG*ST*SC*R | | SRSSSSS | sequence I | rs7685686 |
| | | | A*ST*SC*SA*SC*SC | | | | |
| ONT-452 | ATTAATAAATT | 1715 | A*ST*ST*SA*SA*ST*SA*S | 2067 | SSSSSSSSSSSS | Stereopure Htt | Htt SNP |
| | GTCATCACC | | A*SA*ST*ST*SG*ST*SC*S | | SSRSSSS | sequence II | rs7685686 |
| | | | A*RT*SC*SA*SC*SC | | | | |
| ONT-453 | GGUGAUGACA | 1716 | rGrGrUrGrArUrGrArCrArAr | 2068 | OOOOOOOOO | RNA against Htt | Htt SNP |
| | AUUUAUUAAU | | UrUrUrArUrUrArArU | | OOOOOOOOOO | sequence Mutant | rs7685686 |
| ONT-454 | GGUGAUGGCA | 1717 | rGrGrUrGrArUrGrGrCrArAr | 2069 | OOOOOOOOO | RNA against Htt | Htt SNP |
| | AUUUAUUAAU | | UrUrUrArUrUrArArU | | OOOOOOOOOO | sequence Wild | rs7685686 |
| | | | | | | Type | |
| WV-902 | UUUGGAAGUC | 1718 | rUrUrUrGrGrArArGrUrCrUr | 2070 | OOOOOOOOO | wtRNA | muHTT SNP |
| | UGCGCCCUUGU | | GrCrGrCrCrCrUrUrGrUrGrC | | OOOOOOOOO | | 362307 |
| | GCCC | | rCrC | | OOOOOO | | |
| WV-903 | UUUGGAAGUC | 1719 | rUrUrUrGrGrArArGrUrCrUr | 2071 | OOOOOOOOO | mRNA | muHTT SNP |
| | UGUGCCCUUGU | | GrUrGrCrCrCrUrUrGrUrGrC | | OOOOOOOOO | | 362307 |
| | GCCC | | rCrC | | OOOOOO | | |
| WV-904 | GGGCACAAGG | 1720 | G*G*G*C*A*C*A*A*G*G* | 2072 | XXXXXXXXX | ASO1 All DNA; | muHTT SNP |
| | GCACAGACTT | | G*C*A*C*A*G*A*C*T*T | | XXXXXXXXXX | stereorandom PS | 362307 |
| WV-905 | GGCACAAGGGC | 1721 | G*G*C*A*C*A*A*G*G*G* | 2073 | XXXXXXXXX | ASO2 All DNA; | muHTT SNP |
| | ACAGACTTC | | C*A*C*A*G*A*C*T*T*C | | XXXXXXXXXX | stereorandom PS | 362307 |
| WV-906 | GCACAAGGGCA | 1722 | G*C*A*C*A*A*G*G*G*C* | 2074 | XXXXXXXXX | ASO3 All DNA; | muHTT SNP |
| | CAGACTTCC | | A*C*A*G*A*C*T*T*C*C | | XXXXXXXXXX | stereorandom PS | 362307 |
| WV-907 | CACAAGGGCAC | 1723 | C*A*C*A*A*G*G*G*C*A* | 2075 | XXXXXXXXX | ASO4 All DNA; | muHTT SNP |
| | AGACTTCCA | | C*A*G*A*C*T*T*C*C*A | | XXXXXXXXXX | stereorandom PS | 362307 |
| WV-908 | ACAAGGGCACA | 1724 | A*C*A*A*G*G*G*C*A*C* | 2076 | XXXXXXXXX | ASO5 All DNA; | muHTT SNP |
| | GACTTCCAA | | A*G*A*C*T*T*C*C*A*A | | XXXXXXXXXX | stereorandom PS | 362307 |
| WV-909 | CAAGGGCACAG | 1725 | C*A*A*G*G*G*C*A*C*A* | 2077 | XXXXXXXXX | ASO6 All DNA; | muHTT SNP |
| | ACTTCCAAA | | G*A*C*T*T*C*C*A*A*A | | XXXXXXXXXX | stereorandom PS | 362307 |
| WV-910 | GGGCACAAGG | 1726 | mG*mG*mG*mC*mA*C*A | 2078 | XXXXXXXXX | ASO7 5-15 (2′- | muHTT SNP |
| | GCACAGACTT | | *A*G*G*G*C*A*C*A*G*A | | XXXXXXXXXX | OMe-DNA); | 362307 |
| | | | *C*T*T | | | stereorandom PS | |
| WV-911 | GGCACAAGGGC | 1727 | mG*mG*mC*mA*mC*A*A | 2079 | XXXXXXXXX | ASO8 5-15 (2′- | muHTT SNP |
| | ACAGACTTC | | *G*G*G*C*A*C*A*G*A*C | | XXXXXXXXXX | OMe-DNA); | 362307 |
| | | | *T*T*C | | | stereorandom PS | |
| WV-912 | GCACAAGGGCA | 1728 | mG*mC*mA*mC*mA*A*G | 2080 | XXXXXXXXX | ASO9 5-15 (2′- | muHTT SNP |
| | CAGACTTCC | | *G*G*C*A*C*A*G*A*C*T | | XXXXXXXXXX | OMe-DNA); | 362307 |
| | | | *T*C*C | | | stereorandom PS | |
| WV-913 | CACAAGGGCAC | 1729 | mC*mA*mC*mA*mA*G*G | 2081 | XXXXXXXXX | ASO10 5-15 (2′- | muHTT SNP |
| | AGACTTCCA | | *G*C*A*C*A*G*A*C*T*T | | XXXXXXXXXX | OMe-DNA); | 362307 |
| | | | *C*C*A | | | stereorandom PS | |
| WV-914 | ACAAGGGCACA | 1730 | mA*mC*mA*mA*mG*G*G | 2082 | XXXXXXXXX | ASO11 5-15 (2′- | muHTT SNP |
| | GACTTCCAA | | *C*A*C*A*G*A*C*T*T*C* | | XXXXXXXXXX | OMe-DNA); | 362307 |
| | | | C*A*A | | | stereorandom PS | |
| WV-915 | CAAGGGCACAG | 1731 | mC*mA*mA*mG*mG*G*C | 2083 | XXXXXXXXX | ASO12 5-15 (2′- | muHTT SNP |
| | ACTTCCAAA | | *A*C*A*G*A*C*T*T*C*C* | | XXXXXXXXXX | OMe-DNA); | 362307 |
| | | | A*A*A | | | stereorandom PS | |
| WV-916 | GGGCACAAGG | 1732 | mG*mG*mG*mC*mA*C*A | 2084 | XXXXXXXXX | ASO13 5-10-5 | muHTT SNP |
| | GCACAGACUU | | *A*G*G*G*C*A*C*A*mG* | | XXXXXXXXXX | (2′-OMe-DNA- | 362307 |
| | | | mA*mC*mU*mU | | | 2′-OMe); | |
| | | | | | | stereorandom PS | |
| WV-917 | GGCACAAGGGC | 1733 | mG*mG*mC*mA*mC*A*A | 2085 | XXXXXXXXX | ASO14 5-10-5 | muHTT SNP |
| | ACAGACUUC | | *G*G*G*C*A*C*A*G*mA* | | XXXXXXXXXX | (2′-OMe-DNA- | 362307 |
| | | | mC*mU*mU*mC | | | 2′-OMe); | |
| | | | | | | stereorandom PS | |
| WV-918 | GCACAAGGGCA | 1734 | mG*mC*mA*mC*mA*A*G | 2086 | XXXXXXXXX | ASO15 5-10-5 | muHTT SNP |
| | CAGACUUCC | | *G*G*C*A*C*A*G*A*mC* | | XXXXXXXXXX | (2′-OMe-DNA- | 362307 |
| | | | mU*mU*mC*mC | | | 2′-OMe); | |
| | | | | | | stereorandom PS | |
| WV-919 | CACAAGGGCAC | 1735 | mC*mA*mC*mA*mA*G*G | 2087 | XXXXXXXXX | ASO16 5-10-5 | muHTT SNP |
| | AGACUUCCA | | *G*C*A*C*A*G*A*C*mU* | | XXXXXXXXXX | (2′-OMe-DNA- | 362307 |
| | | | mU*mC*mC*mA | | | 2′-OMe); | |
| | | | | | | stereorandom PS | |
| WV-920 | ACAAGGGCACA | 1736 | mA*mC*mA*mA*mG*G*G | 2088 | XXXXXXXXX | ASO17 5-10-5 | muHTT SNP |
| | GACTUCCAA | | *C*A*C*A*G*A*C*T*mU* | | XXXXXXXXXX | (2′-OMe-DNA- | 362307 |
| | | | mC*mC*mA*mA | | | 2′-OMe); | |
| | | | | | | stereorandom PS | |
| WV-921 | CAAGGGCACAG | 1737 | mC*mA*mA*mG*mG*G*C | 2089 | XXXXXXXXX | ASO18 5-10-5 | muHTT SNP |
| | ACTTCCAAA | | *A*C*A*G*A*C*T*T*mC* | | XXXXXXXXXX | (2′-OMe-DNA- | 362307 |
| | | | mC*mA*mA*mA | | | 2′-OMe); | |
| | | | | | | stereorandom PS | |
| WV-922 | GCACAAGGGCA | 1738 | mG*mC*mA*mC*mA*mA* | 2090 | XXXXXXXXX | ASO19 8-7-5 (2′- | muHTT SNP |
| | CAGACUUCC | | mG*mG*G*C*A*C*A*G*A | | XXXXXXXXXX | OMe-DNA-2′- | 362307 |
| | | | *mC*mU*mU*mC*mC | | | OMe); | |
| | | | | | | stereorandom PS | |
| WV-923 | CACAAGGGCAC | 1739 | mC*mA*mC*mA*mA*mG* | 2091 | XXXXXXXXX | ASO20 7-7-6 (2′- | muHTT SNP |
| | AGACUUCCA | | mG*G*C*A*C*A*G*A*mC | | XXXXXXXXXX | OMe-DNA-2′- | 362307 |
| | | | *mU*mU*mC*mC*mA | | | OMe); | |
| | | | | | | stereorandom PS | |
| WV-924 | ACAAGGGCACA | 1740 | mA*mC*mA*mA*mG*mG* | 2092 | XXXXXXXXX | ASO21 6-7-5 (2′- | muHTT SNP |
| | GACUUCCAA | | G*C*A*C*A*G*A*mC*mU | | XXXXXXXXXX | OMe-DNA-2′- | 362307 |
| | | | *mU*mC*mC*mA*mA | | | OMe); | |
| | | | | | | stereorandom PS; | |
| | | | | | | PO in the wings | |
| WV-925 | CAAGGGCACAG | 1741 | mC*mA*mA*mG*mG*G*C | 2093 | XXXXXXXXX | ASO22 5-7-8 (2′- | muHTT SNP |
| | ACUUCCAAA | | *A*C*A*G*A*mC*mU*mU | | XXXXXXXXXX | OMe-DNA-2′- | 362307 |
| | | | *mC*mC*mA*mA*mA | | | OMe); | |
| | | | | | | stereorandom PS; | |
| | | | | | | PO in the wings | |
| WV-926 | GCACAAGGGCA | 1742 | mGmCmAmCmAmAmGmG | 2094 | OOOOOOOXX | ASO23 8-7-5 (2′- | muHTT SNP |
| | CAGACUUCC | | *G*C*A*C*A*G*A*mCmU | | XXXXXXOOOO | OMe-DNA-2′- | 362307 |
| | | | mUmCmC | | | OMe); | |
| | | | | | | stereorandom PS; | |
| | | | | | | PO in the wings | |
| WV-927 | CACAAGGGCAC | 1743 | mCmAmCmAmAmGmG*G* | 2095 | OOOOOOXXX | ASO24 7-7-6 (2′- | muHTT SNP |
| | AGACUUCCA | | C*A*C*A*G*A*mCmUmU | | XXXXXOOOOO | OMe-DNA-2′- | 362307 |
| | | | mCmCmA | | | OMe); | |
| | | | | | | stereorandom PS; | |
| | | | | | | PO in the wings | |
| WV-928 | ACAAGGGCACA | 1744 | mAmCmAmAmGmG*G*C* | 2096 | OOOOOXXXX | ASO25 6-7-5 (2′- | muHTT SNP |
| | GACUUCCAA | | A*C*A*G*A*mCmUmUmC | | XXXXOOOOOO | OMe-DNA-2′- | 362307 |
| | | | mCmAmA | | | OMe); | |
| | | | | | | stereorandom PS; | |
| | | | | | | PO in the wings | |
| WV-929 | CAAGGGCACAG | 1745 | mCmAmAmGmG*G*C*A*C | 2097 | OOOOXXXXX | ASO26 5-7-8 (2′- | muHTT SNP |
| | ACUUCCAAA | | *A*G*A*mCmUmUmCmCm | | XXXOOOOOOO | OMe-DNA-2′- | 362307 |
| | | | AmAmA | | | OMe); | |
| | | | | | | stereorandom PS; | |
| | | | | | | PO in the wings | |
| WV-930 | GGGCACAAGG | 1746 | mGmGmGmCmA*C*A*A*G | 2098 | OOOOXXXXX | ASO27 5-10-5 | muHTT SNP |
| | GCACAGACUU | | *G*G*C*A*C*A*mGmAmC | | XXXXXXOOOO | (2′-OMe-DNA- | 362307 |
| | | | mUmU | | | 2′-OMe); | |
| | | | | | | stereorandom PS; | |
| | | | | | | PO in the wings | |
| WV-931 | GGCACAAGGGC | 1747 | mGmGmCmAmC*A*A*G*G | 2099 | OOOOXXXXX | ASO28 5-10-5 | muHTT SNP |
| | ACAGACUUC | | *G*C*A*C*A*G*mAmCmU | | XXXXXXOOOO | (2′-OMe-DNA- | 362307 |
| | | | mUmC | | | 2′-OMe); | |
| | | | | | | stereorandom PS; | |
| | | | | | | PO in the wings | |
| WV-932 | GCACAAGGGCA | 1748 | mGmCmAmCmA*A*G*G*G | 2100 | OOOOXXXXX | ASO29 5-10-5 | muHTT SNP |
| | CAGACUUCC | | *C*A*C*A*G*A*mCmUmU | | XXXXXXOOOO | (2′-OMe-DNA- | 362307 |
| | | | mCmC | | | 2′-OMe); | |
| | | | | | | stereorandom PS; | |
| | | | | | | PO in the wings | |
| WV-933 | CACAAGGGCAC | 1749 | mCmAmCmAmA*G*G*G*C | 2101 | OOOOXXXXX | ASO30 5-10-5 | muHTT SNP |
| | AGACUUCCA | | *A*C*A*G*A*C*mUmUmC | | XXXXXXOOOO | (2′-OMe-DNA- | 362307 |
| | | | mCmA | | | 2′-OMe); | |
| | | | | | | stereorandom PS; | |
| | | | | | | PO in the wings | |
| WV-934 | ACAAGGGCACA | 1750 | mAmCmAmAmG*G*G*C*A | 2102 | OOOOXXXXX | ASO31 5-10-5 | muHTT SNP |
| | GACTUCCAA | | *C*A*G*A*C*T*mUmCmC | | XXXXXXOOOO | (2′-OMe-DNA- | 362307 |
| | | | mAmA | | | 2′-OMe); | |
| | | | | | | stereorandom PS; | |
| | | | | | | PO in the wings | |
| WV-935 | CAAGGGCACAG | 1751 | mCmAmAmGmG*G*C*A*C | 2103 | OOOOXXXXX | ASO32 5-10-5 | muHTT SNP |
| | ACTTCCAAA | | *A*G*A*C*T*T*mCmCmA | | XXXXXXOOOO | (2′-OMe-DNA- | 362307 |
| | | | mAmA | | | 2′-OMe); | |
| | | | | | | stereorandom PS; | |
| | | | | | | PO in the wings | |
| WV-936 | GGGCACAAGG | 1752 | G*SG*SG*SC*SA*SC*SA* | 2104 | SSSSSSSSSSSS | ASO33 | muHTT SNP |
| | GCACAGACTT | | SA*SG*SG*SG*SC*SA*SC | | SRSSSSS | Stereopure DNA; | 362307 |
| | | | *RA*SG*SA*SC*ST*ST | | | One Rp; position | |
| | | | | | | 14 | |
| WV-937 | GGCACAAGGGC | 1753 | G*SG*SC*SA*SC*SA*SA* | 2105 | SSSSSSSSSSSS | ASO34 | muHTT SNP |
| | ACAGACTTC | | SG*SG*SG*SC*SA*SC*RA | | RSSSSSS | Stereopure DNA; | 362307 |
| | | | *SG*SA*SC*ST*ST*SC | | | One Rp; position | |
| | | | | | | 13 | |
| WV-938 | GCACAAGGGCA | 1754 | G*SC*SA*SC*SA*SA*SG* | 2106 | SSSSSSSSSSSR | ASO35 | muHTT SNP |
| | CAGACTTCC | | SG*SG*SC*SA*SC*RA*SG | | SSSSSSS | Stereopure DNA; | 362307 |
| | | | *SA*SC*ST*ST*SC*SC | | | One Rp; position | |
| | | | | | | 12 | |
| WV-939 | CACAAGGGCAC | 1755 | C*SA*SC*SA*SA*SG*SG* | 2107 | SSSSSSSSSSRS | ASO36 | muHTT SNP |
| | AGACTTCCA | | SG*SC*SA*SC*RA*SG*SA | | SSSSSSS | Stereopure DNA; | 362307 |
| | | | *SC*ST*ST*SC*SC*SA | | | One Rp; position | |
| | | | | | | 11 | |
| WV-940 | ACAAGGGCACA | 1756 | A*SC*SA*SA*SG*SG*SG* | 2108 | SSSSSSSSSRSS | ASO37 | muHTT SNP |
| | GACTTCCAA | | SC*SA*SC*RA*SG*SA*SC | | SSSSSSS | Stereopure DNA; | 362307 |
| | | | *ST*ST*SC*SC*SA*SA | | | One Rp; position | |
| | | | | | | 10 | |
| WV-941 | CAAGGGCACAG | 1757 | C*SA*SA*SG*SG*SG*SC* | 2109 | SSSSSSSSRSSS | ASO38 | muHTT SNP |
| | ACTTCCAAA | | SA*SC*RA*SG*SA*SC*ST | | SSSSSSS | Stereopure DNA; | 362307 |
| | | | *ST*SC*SC*SA*SA*SA | | | One Rp; position 9 | |
| WV-944 | UUUGGAAGUC | 1758 | rUrUrUrGrGrArArGrUrCrUr | 2110 | OOOOOOOOO | HTT-rs362307 | Huntington |
| | UGCGCCCUUGU | | GrCrGrCrCrCrUrUrGrUrGrC | | OOOOOOOOO | human | |
| | GCCC | | rCrC | | OOOOOO | | |
| WV-945 | UUUGGAAGUC | 1759 | rUrUrUrGrGrArArGrUrCrUr | 2111 | OOOOOOOOO | HTT-rs362307 | Huntington |
| | UGUGCCCUUGU | | GrUrGrCrCrCrUrUrGrUrGrC | | OOOOOOOOO | human | |
| | GCCC | | rCrC | | OOOOOO | | |
| WV-948 | GAGCAGCTGCA | 1760 | G*A*G*C*A*G*C*T*G*C* | 2112 | XXXXXXXXX | HTT-rs362306 | HTT-rs362306 |
| | ACCTGGCAA | | A*A*C*C*T*G*G*C*A*A | | XXXXXXXXXX | | |
| WV-949 | GGGCCAACAGC | 1761 | G*G*G*C*C*A*A*C*A*G* | 2113 | XXXXXXXXX | HTT-rs362268 | HTT-rs362268 |
| | CAGCCTGCA | | C*C*A*G*C*C*T*G*C*A | | XXXXXXXXXX | | |
| WV-950 | GGUUGUUGCC | 1762 | rGrGrUrUrGrUrUrGrCrCrAr | 2114 | OOOOOOOOO | | HTT-rs362306 |
| | AGGUUACAGC | | GrGrUrUrArCrArGrCrUrGrC | | OOOOOOOOO | | |
| | UGCUC | | rUrC | | OOOOOO | | |
| WV-951 | GGUUGUUGCC | 1763 | rGrGrUrUrGrUrUrGrCrCrAr | 2115 | OOOOOOOOO | | HTT-rs362306 |
| | AGGUUGCAGC | | GrGrUrUrGrCrArGrCrUrGrC | | OOOOOOOOO | | |
| | UGCUC | | rUrC | | OOOOOO | | |
| WV-952 | GAGCAGCTGCA | 1764 | G*SA*SG*SC*SA*SG*SC* | 2116 | SSSSSSSSSSRS | Stereopure PS | HTT-rs362306 |
| | ACCTGGCAA | | ST*SG*SC*SA*RA*SC*SC* | | SSSSSSS | DNA; One Rp at | |
| | | | ST*SG*SG*SC*SA*SA | | | position 11 | |
| WV-953 | AGCAGCTGCAA | 1765 | A*SG*SC*SA*SG*SC*ST*S | 2117 | SSSSSSSSSRSS | Stereopure PS | HTT-rs362306 |
| | CCTGGCAAC | | G*SC*SA*RA*SC*SC*ST*S | | SSSSSSS | DNA; One Rp at | |
| | | | G*SG*SC*SA*SA*SC | | | position 10 | |
| WV-954 | GCAGCTGCAAC | 1766 | G*SC*SA*SG*SC*ST*SG*S | 2118 | SSSSSSSSRSSS | Stereopure PS | HTT-rs362306 |
| | CTGGCAACA | | C*SA*RA*SC*SC*ST*SG*S | | SSSSSSS | DNA; One Rp at | |
| | | | G*SC*SA*SA*SC*SA | | | position 9 | |
| WV-955 | CAGCTGCAACC | 1767 | C*SA*SG*SC*ST*SG*SC*S | 2119 | SSSSSSSRSSSS | Stereopure PS | HTT-rs362306 |
| | TGGCAACAA | | A*RA*SC*SC*ST*SG*SG* | | SSSSSSS | DNA; One Rp at | |
| | | | SC*SA*SA*SC*SA*SA | | | position 8 | |
| WV-956 | AGCTGCAACCT | 1768 | A*SG*SC*ST*SG*SC*SA* | 2120 | SSSSSSRSSSSS | Stereopure PS | HTT-rs362306 |
| | GGCAACAAC | | RA*SC*SC*ST*SG*SG*SC* | | SSSSSSS | DNA; One Rp at | |
| | | | SA*SA*SC*SA*SA*SC | | | position 7 | |
| WV-957 | GCTGCAACCTG | 1769 | G*SC*ST*SG*SC*SA*RA* | 2121 | SSSSSRSSSSSS | Stereopure PS | HTT-rs362306 |
| | GCAACAACC | | SC*SC*ST*SG*SG*SC*SA* | | SSSSSSS | DNA; One Rp at | |
| | | | SA*SC*SA*SA*SC*SC | | | position 6 | |
| WV-958 | CCUCCUGCAGG | 1770 | rCrCrUrCrCrUrGrCrArGrGrC | 2122 | OOOOOOOOO | | HTT-rs362268 |
| | CUGGGUGUUG | | rUrGrGrGrUrGrUrUrGrGrCr | | OOOOOOOOO | | |
| | GCCC | | CrC | | OOOOOO | | |
| WV-959 | CCUCCUGCAGG | 1771 | rCrCrUrCrCrUrGrCrArGrGrC | 2123 | OOOOOOOOO | | HTT-rs362268 |
| | CUGGCUGUUG | | rUrGrGrCrUrGrUrUrGrGrCr | | OOOOOOOOO | | |
| | GCCC | | CrC | | OOOOOO | | |
| WV-960 | GGGCCAACAGC | 1772 | G*SG*SG*SC*SC*SA*SA* | 2124 | SSSSSSSSSSRS | Stereopure PS | HTT-rs362268 |
| | CAGCCTGCA | | SC*SA*SG*SC*RC*SA*SG | | SSSSSSS | DNA; One Rp at | |
| | | | *SC*SC*ST*SG*SC*SA | | | position 11 | |
| WV-961 | GGCCAACAGCC | 1773 | G*SG*SC*SC*SA*SA*SC*S | 2125 | SSSSSSSSSRSS | Stereopure PS | HTT-rs362268 |
| | AGCCTGCAG | | A*SG*SC*RC*SA*SG*SC* | | SSSSSSS | DNA; One Rp at | |
| | | | SC*ST*SG*SC*SA*SG | | | position 10 | |
| WV-962 | GCCAACAGCCA | 1774 | G*SC*SC*SA*SA*SC*SA*S | 2126 | SSSSSSSSRSSS | Stereopure PS | HTT-rs362268 |
| | GCCTGCAGG | | G*SC*RC*SA*SG*SC*SC* | | SSSSSSS | DNA; One Rp at | |
| | | | ST*SG*SC*SA*SG*SG | | | position 9 | |
| WV-963 | CCAACAGCCAG | 1775 | C*SC*SA*SA*SC*SA*SG*S | 2127 | SSSSSSSRSSSS | Stereopure PS | HTT-rs362268 |
| | CCTGCAGGA | | C*RC*SA*SG*SC*SC*ST*S | | SSSSSSS | DNA; One Rp at | |
| | | | G*SC*SA*SG*SG*SA | | | position 8 | |
| WV-964 | CAACAGCCAGC | 1776 | C*SA*SA*SC*SA*SG*SC* | 2128 | SSSSSSRSSSSS | Stereopure PS | HTT-rs362268 |
| | CTGCAGGAG | | RC*SA*SG*SC*SC*ST*SG* | | SSSSSSS | DNA; One Rp at | |
| | | | SC*SA*SG*SG*SA*SG | | | position 7 | |
| WV-965 | AACAGCCAGCC | 1777 | A*SA*SC*SA*SG*SC*RC* | 2129 | SSSSSRSSSSSS | Stereopure PS | HTT-rs362268 |
| | TGCAGGAGG | | SA*SG*SC*SC*ST*SG*SC* | | SSSSSSS | DNA; One Rp at | |
| | | | SA*SG*SG*SA*SG*SG | | | position 6 | |
| WV-973 | GGCCUUUCACU | 1778 | rGrGrCrCrUrUrUrCrArCrUr | 2130 | OOOOOOOOO | siRNA (+control | Htt |
| | ACUCCUACTT | | ArCrUrCrCrUrArCTT | | OOOOOOOOO | for Renilla | |
| | | | | | OO | luciferase in | |
| | | | | | | psiCHECK2 | |
| | | | | | | plasmid) | |
| | | | | | | antisense strand | |
| WV-974 | GUAGGAGUAG | 1779 | rGrUrArGrGrArGrUrArGrUr | 2131 | OOOOOOOOO | siRNA (+control | Htt SNP |
| | UGAAAGGCCTT | | GrArArArGrGrCrCTT | | OOOOOOOOO | for Renilla | rs362268 |
| | | | | | OO | luciferase in | |
| | | | | | | psiCHECK2 | |
| | | | | | | plasmid) sense | |
| | | | | | | strand | |
| WV-975 | GTAGGAGTAGT | 1780 | G*T*A*G*G*A*G*T*A*G* | 2132 | XXXXXXXXX | ASO (+control | Htt SNP |
| | GAAAGGCCA | | T*G*A*A*A*G*G*C*C*A | | XXXXXXXXXX | for Renilla | rs362268 |
| | | | | | | luciferase in | |
| | | | | | | psiCHECK2 | |
| | | | | | | plasmid) | |
| WV-982 | GCAGGGCACAA | 1781 | G*SC*SA*SG*SG*SG*SC* | 2133 | SSSSSSSSSSSS | Htt seq 307 | Htt rs362307 |
| | GGGCACAGA | | SA*SC*SA*SA*SG*SG*SG | | SSSSRSS | expanding 3 nt | |
| | | | *SC*SA*SC*RA*SG*SA | | | towards 3′ | |
| | | | | | | example 3 | |
| WV-983 | CAGGGCACAAG | 1782 | C*SA*SG*SG*SG*SC*SA* | 2134 | SSSSSSSSSSSS | Htt seq 307 | Htt rs362307 |
| | GGCACAGAC | | SC*SA*SA*SG*SG*SG*SC | | SSSRSSS | expanding 3 nt | |
| | | | *SA*SC*RA*SG*SA*SC | | | towards 3′ | |
| | | | | | | example 2 | |
| WV-984 | AGGGCACAAG | 1783 | A*SG*SG*SG*SC*SA*SC* | 2135 | SSSSSSSSSSSS | Htt seq 307 | Htt rs362307 |
| | GGCACAGACT | | SA*SA*SG*SG*SG*SC*SA | | SSRSSSS | expanding 3 nt | |
| | | | *SC*RA*SG*SA*SC*ST | | | towards 3′ | |
| | | | | | | example 1 | |
| WV-985 | AAGGGCACAG | 1784 | A*SA*SG*SG*SG*SC*SA* | 2136 | SSSSSSSRSSSS | Htt seq 307 | Htt rs362307 |
| | ACTTCCAAAG | | SC*RA*SG*SA*SC*ST*ST* | | SSSSSSS | expanding 3 nt | |
| | | | SC*SC*SA*SA*SA*SG | | | towards 5′ | |
| | | | | | | example 1 | |
| WV-986 | AGGGCACAGAC | 1785 | A*SG*SG*SG*SC*SA*SC* | 2137 | SSSSSSRSSSSS | Htt seq 307 | Htt rs362307 |
| | TTCCAAAGG | | RA*SG*SA*SC*ST*ST*SC* | | SSSSSSS | expanding 3 nt | |
| | | | SC*SA*SA*SA*SG*SG | | | towards 5′ | |
| | | | | | | example 2 | |
| WV-987 | GGGCACAGACT | 1786 | G*SG*SG*SC*SA*SC*RA* | 2138 | SSSSSRSSSSSS | Htt seq 307 | Htt rs362307 |
| | TCCAAAGGC | | SG*SA*SC*ST*ST*SC*SC* | | SSSSSSS | expanding 3 nt | |
| | | | SA*SA*SA*SG*SG*SC | | | towards 5′ | |
| | | | | | | example 3 | |
| WV-1001 | GAGCAGCTGCA | 1787 | G*A*G*C*A*G*C*T*G*C* | 2139 | XXXXXXXXX | All DNA; | HTT-rs362306 |
| | ACCTGGCAA | | A*A*C*C*T*G*G*C*A*A | | XXXXXXXXXX | stereorandom PS | |
| WV-1002 | AGCAGCTGCAA | 1788 | A*G*C*A*G*C*T*G*C*A* | 2140 | XXXXXXXXX | All DNA; | HTT-rs362306 |
| | CCTGGCAAC | | A*C*C*T*G*G*C*A*A*C | | XXXXXXXXXX | stereorandom PS | |
| WV-1003 | GCAGCTGCAAC | 1789 | G*C*A*G*C*T*G*C*A*A* | 2141 | XXXXXXXXX | All DNA; | HTT-rs362306 |
| | CTGGCAACA | | C*C*T*G*G*C*A*A*C*A | | XXXXXXXXXX | stereorandom PS | |
| WV-1004 | CAGCTGCAACC | 1790 | C*A*G*C*T*G*C*A*A*C* | 2142 | XXXXXXXXX | All DNA; | HTT-rs362306 |
| | TGGCAACAA | | C*T*G*G*C*A*A*C*A*A | | XXXXXXXXXX | stereorandom PS | |
| WV-1005 | AGCTGCAACCT | 1791 | A*G*C*T*G*C*A*A*C*C* | 2143 | XXXXXXXXX | All DNA; | HTT-rs362306 |
| | GGCAACAAC | | T*G*G*C*A*A*C*A*A*C | | XXXXXXXXXX | stereorandom PS | |
| WV-1006 | GCTGCAACCTG | 1792 | G*C*T*G*C*A*A*C*C*T* | 2144 | XXXXXXXXX | All DNA; | HTT-rs362306 |
| | GCAACAACC | | G*G*C*A*A*C*A*A*C*C | | XXXXXXXXXX | stereorandom PS | |
| WV-1007 | GAGCAGCTGCA | 1793 | mG*mA*mG*mC*mA*G*C | 2145 | XXXXXXXXX | 5-15 (2′-OMe- | HTT-rs362306 |
| | ACCTGGCAA | | *T*G*C*A*A*C*C*T*G*G | | XXXXXXXXXX | DNA); | |
| | | | *C*A*A | | | stereorandom PS | |
| WV-1008 | AGCAGCTGCAA | 1794 | mA*mG*mC*mA*mG*C*T* | 2146 | XXXXXXXXX | 5-15 (2′-OMe- | HTT-rs362306 |
| | CCTGGCAAC | | G*C*A*A*C*C*T*G*G*C* | | XXXXXXXXXX | DNA); | |
| | | | A*A*C | | | stereorandom PS | |
| WV-1009 | GCAGCTGCAAC | 1795 | mG*mC*mA*mG*mC*T*G* | 2147 | XXXXXXXXX | 5-15 (2′-OMe- | HTT-rs362306 |
| | CTGGCAACA | | C*A*A*C*C*T*G*G*C*A* | | XXXXXXXXXX | DNA); | |
| | | | A*C*A | | | stereorandom PS | |
| WV-1010 | CAGCUGCAACC | 1796 | mC*mA*mG*mC*mU*G*C* | 2148 | XXXXXXXXX | 5-15 (2′-OMe- | HTT-rs362306 |
| | TGGCAACAA | | A*A*C*C*T*G*G*C*A*A* | | XXXXXXXXXX | DNA); | |
| | | | C*A*A | | | stereorandom PS | |
| WV-1011 | AGCUGCAACCT | 1797 | mA*mG*mC*mU*mG*C*A | 2149 | XXXXXXXXX | 5-15 (2′-OMe- | HTT-rs362306 |
| | GGCAACAAC | | *A*C*C*T*G*G*C*A*A*C | | XXXXXXXXXX | DNA); | |
| | | | *A*A*C | | | stereorandom PS | |
| WV-1012 | GCUGCAACCTG | 1798 | mG*mC*mU*mG*mC*A*A | 2150 | XXXXXXXXX | 5-15 (2′-OMe- | HTT-rs362306 |
| | GCAACAACC | | *C*C*T*G*G*C*A*A*C*A | | XXXXXXXXXX | DNA); | |
| | | | *A*C*C | | | stereorandom PS | |
| WV-1013 | GAGCAGCTGCA | 1799 | mG*mA*mG*mC*mA*G*C | 2151 | XXXXXXXXX | 5-10-5 (2′-OMe- | HTT-rs362306 |
| | ACCTGGCAA | | *T*G*C*A*A*C*C*T*mG* | | XXXXXXXXXX | DNA-2′-OMe); | |
| | | | mG*mC*mA*mA | | | stereorandom PS | |
| WV-1014 | AGCAGCTGCAA | 1800 | mA*mG*mC*mA*mG*C*T* | 2152 | XXXXXXXXX | 5-10-5 (2′-OMe- | HTT-rs362306 |
| | CCTGGCAAC | | G*C*A*A*C*C*T*G*mG*m | | XXXXXXXXXX | DNA-2′-OMe); | |
| | | | C*mA*mA*mC | | | stereorandom PS | |
| WV-1015 | GCAGCTGCAAC | 1801 | mG*mC*mA*mG*mC*T*G* | 2153 | XXXXXXXXX | 5-10-5 (2′-OMe- | HTT-rs362306 |
| | CTGGCAACA | | C*A*A*C*C*T*G*G*mC*m | | XXXXXXXXXX | DNA-2′-OMe); | |
| | | | A*mA*mC*mA | | | stereorandom PS | |
| WV-1016 | CAGCUGCAACC | 1802 | mC*mA*mG*mC*mU*G*C* | 2154 | XXXXXXXXX | 5-10-5 (2′-OMe- | HTT-rs362306 |
| | TGGCAACAA | | A*A*C*C*T*G*G*C*mA*m | | XXXXXXXXXX | DNA-2′-OMe); | |
| | | | A*mC*mA*mA | | | stereorandom PS | |
| WV-1017 | AGCUGCAACCT | 1803 | mA*mG*mC*mU*mG*C*A | 2155 | XXXXXXXXX | 5-10-5 (2′-OMe- | HTT-rs362306 |
| | GGCAACAAC | | *A*C*C*T*G*G*C*A*mA* | | XXXXXXXXXX | DNA-2′-OMe); | |
| | | | mC*mA*mA*mC | | | stereorandom PS | |
| WV-1018 | GCUGCAACCTG | 1804 | mG*mC*mU*mG*mC*A*A | 2156 | XXXXXXXXX | 5-10-5 (2′-OMe- | HTT-rs362306 |
| | GCAACAACC | | *C*C*T*G*G*C*A*A*mC* | | XXXXXXXXXX | DNA-2′-OMe); | |
| | | | mA*mA*mC*mC | | | stereorandom PS | |
| WV-1019 | GAGCAGCTGCA | 1805 | mG*mA*mG*mC*mA*mG* | 2157 | XXXXXXXXX | 7-7-6 (2′-OMe- | HTT-rs362306 |
| | ACCUGGCAA | | mC*T*G*C*A*A*C*C*mU* | | XXXXXXXXX | DNA-2′-OMe); | |
| | | | mG*mG*mC*mA*mA | | | stereorandom PS | |
| WV-1020 | GAGCAGCTGCA | 1806 | mGmAmGmCmAmGmC*T* | 2158 | OOOOOOXXX | 7-7-6 (2′-OMe- | HTT-rs362306 |
| | ACCUGGCAA | | G*C*A*A*C*C*mUmGmG | | XXXXXOOOOO | DNA-2′-OMe); | |
| | | | mCmAmA | | | stereorandom PS; | |
| | | | | | | PO in wings | |
| WV-1021 | AGCAGCTGCAA | 1807 | mA*mG*mC*mA*mG*mC* | 2159 | XXXXXXXXX | 6-7-5 (2′-OMe- | HTT-rs362306 |
| | CCTGGCAAC | | T*G*C*A*A*C*C*T*G*mG | | XXXXXXXXXX | DNA-2′-OMe); | |
| | | | *mC*mA*mA*mC | | | stereorandom PS | |
| WV-1022 | AGCAGCTGCAA | 1808 | mAmGmCmAmGmC*T*G* | 2160 | OOOOOXXXX | 6-7-5 (2′-OMe- | HTT-rs362306 |
| | CCTGGCAAC | | C*A*A*C*C*T*G*mGmCm | | XXXXXXOOOO | DNA-2′-OMe); | |
| | | | AmAmC | | | stereorandom PS; | |
| | | | | | | PO in the wings | |
| WV-1023 | GCAGCTGCAAC | 1809 | mG*mC*mA*mG*mC*T*G* | 2161 | XXXXXXXXX | 5-7-8 (2′-OMe- | HTT-rs362306 |
| | CUGGCAACA | | C*A*A*C*C*mU*mG*mG* | | XXXXXXXXXX | DNA-2′-OMe); | |
| | | | mC*mA*mA*mC*mA | | | stereorandom PS | |
| WV-1024 | GCAGCTGCAAC | 1810 | mGmCmAmGmC*T*G*C*A | 2162 | OOOOXXXXX | 5-7-8 (2′-OMe- | HTT-rs362306 |
| | CUGGCAACA | | *A*C*C*mUmGmGmCmAm | | XXXOOOOOOO | DNA-2′-OMe); | |
| | | | AmCmA | | | stereorandom PS; | |
| | | | | | | PO in the wings | |
| WV-1025 | GAGCAGCTGCA | 1811 | mGmAmGmCmA*G*C*T*G | 2163 | OOOOXXXXX | 5-10-5 (2′-OMe- | HTT-rs362306 |
| | ACCTGGCAA | | *C*A*A*C*C*T*mGmGmC | | XXXXXXOOOO | DNA-2′-OMe); | |
| | | | mAmA | | | stereorandom PS; | |
| | | | | | | PO in the wings | |
| WV-1026 | AGCAGCTGCAA | 1812 | mAmGmCmAmG*C*T*G*C | 2164 | OOOOXXXXX | 5-10-5 (2′-OMe- | HTT-rs362306 |
| | CCTGGCAAC | | *A*A*C*C*T*G*mGmCmA | | XXXXXXOOOO | DNA-2′-OMe); | |
| | | | mAmC | | | stereorandom PS; | |
| | | | | | | PO in the wings | |
| WV-1027 | GCAGCTGCAAC | 1813 | mGmCmAmGmCT*G*C*A* | 2165 | OOOOOXXXX | 5-10-5 (2′-OMe- | HTT-rs362306 |
| | CTGGCAACA | | A*C*C*T*G*G*mCmAmA | | XXXXXXOOOO | DNA-2′-OMe); | |
| | | | mCmA | | | stereorandom PS; | |
| | | | | | | PO in the wings | |
| WV-1028 | CAGCUGCAACC | 1814 | mCmAmGmCmU*G*C*A*A | 2166 | OOOOXXXXX | 5-10-5 (2′-OMe- | HTT-rs362306 |
| | TGGCAACAA | | *C*C*T*G*G*C*mAmAmC | | XXXXXXOOOO | DNA-2′-OMe); | |
| | | | mAmA | | | stereorandom PS; | |
| | | | | | | PO in the wings | |
| WV-1029 | AGCUGCAACCT | 1815 | mAmGmCmUmG*C*A*A*C | 2167 | OOOOXXXXX | 5-10-5 (2′-OMe- | HTT-rs362306 |
| | GGCAACAAC | | *C*T*G*G*C*A*mAmCmA | | XXXXXXOOOO | DNA-2′-OMe); | |
| | | | mAmC | | | stereorandom PS; | |
| | | | | | | PO in the wings | |
| WV-1030 | GCUGCAACCTG | 1816 | mGmCmUmGmC*A*A*C*C | 2168 | OOOOXXXXX | 5-10-5 (2′-OMe- | HTT-rs362306 |
| | GCAACAACC | | *T*G*G*C*A*A*mCmAmA | | XXXXXXOOOO | DNA-2′-OMe); | |
| | | | mCmC | | | stereorandom PS; | |
| | | | | | | PO in the wings | |
| WV-1031 | GGGCCAACAGC | 1817 | G*G*G*C*C*A*A*C*A*G* | 2169 | XXXXXXXXX | All DNA; | HTT-rs362268 |
| | CAGCCTGCA | | C*C*A*G*C*C*T*G*C*A | | XXXXXXXXXX | stereorandom PS | |
| WV-1032 | GGCCAACAGCC | 1818 | G*G*C*C*A*A*C*A*G*C* | 2170 | XXXXXXXXX | All DNA; | HTT-rs362268 |
| | AGCCTGCAG | | C*A*G*C*C*T*G*C*A*G | | XXXXXXXXXX | stereorandom PS | |
| WV-1033 | GCCAACAGCCA | 1819 | G*C*C*A*A*C*A*G*C*C* | 2171 | XXXXXXXXX | All DNA; | HTT-rs362268 |
| | GCCTGCAGG | | A*G*C*C*T*G*C*A*G*G | | XXXXXXXXXX | stereorandom PS | |
| WV-1034 | CCAACAGCCAG | 1820 | C*C*A*A*C*A*G*C*C*A* | 2172 | XXXXXXXXX | All DNA; | HTT-rs362268 |
| | CCTGCAGGA | | G*C*C*T*G*C*A*G*G*A | | XXXXXXXXXX | stereorandom PS | |
| WV-1035 | CAACAGCCAGC | 1821 | C*A*A*C*A*G*C*C*A*G* | 2173 | XXXXXXXXX | All DNA; | HTT-rs362268 |
| | CTGCAGGAG | | C*C*T*G*C*A*G*G*A*G | | XXXXXXXXXX | stereorandom PS | |
| WV-1036 | AACAGCCAGCC | 1822 | A*A*C*A*G*C*C*A*G*C* | 2174 | XXXXXXXXX | All DNA; | HTT-rs362268 |
| | TGCAGGAGG | | C*T*G*C*A*G*G*A*G*G | | XXXXXXXXXX | stereorandom PS | |
| WV-1037 | GGGCCAACAGC | 1823 | mG*mG*mG*mC*mC*A*A | 2175 | XXXXXXXXX | 5-15 (2′-OMe- | HTT-rs362268 |
| | CAGCCTGCA | | *C*A*G*C*C*A*G*C*C*T | | XXXXXXXXXX | DNA); | |
| | | | *G*C*A | | | stereorandom PS | |
| WV-1038 | GGCCAACAGCC | 1824 | mG*mG*mC*mC*mA*A*C* | 2176 | XXXXXXXXX | 5-15 (2′-OMe- | HTT-rs362268 |
| | AGCCTGCAG | | A*G*C*C*A*G*C*C*T*G* | | XXXXXXXXXX | DNA); | |
| | | | C*A*G | | | stereorandom PS | |
| WV-1039 | GCCAACAGCCA | 1825 | mG*mC*mC*mA*mA*C*A* | 2177 | XXXXXXXXX | 5-15 (2′-OMe- | HTT-rs362268 |
| | GCCTGCAGG | | G*C*C*A*G*C*C*T*G*C* | | XXXXXXXXXX | DNA); | |
| | | | A*G*G | | | stereorandom PS | |
| WV-1040 | CCAACAGCCAG | 1826 | mC*mC*mA*mA*mC*A*G* | 2178 | XXXXXXXXX | 5-15 (2′-OMe- | HTT-rs362268 |
| | CCTGCAGGA | | C*C*A*G*C*C*T*G*C*A* | | XXXXXXXXXX | DNA); | |
| | | | G*G*A | | | stereorandom PS | |
| WV-1041 | CAACAGCCAGC | 1827 | mC*mA*mA*mC*mA*G*C* | 2179 | XXXXXXXXX | 5-15 (2′-OMe- | HTT-rs362268 |
| | CTGCAGGAG | | C*A*G*C*C*T*G*C*A*G* | | XXXXXXXXXX | DNA); | |
| | | | G*A*G | | | stereorandom PS | |
| WV-1042 | AACAGCCAGCC | 1828 | mA*mA*mC*mA*mG*C*C* | 2180 | XXXXXXXXX | 5-15 (2′-OMe- | HTT-rs362268 |
| | TGCAGGAGG | | A*G*C*C*T*G*C*A*G*G* | | XXXXXXXXXX | DNA); | |
| | | | A*G*G | | | stereorandom PS | |
| WV-1043 | GGGCCAACAGC | 1829 | mG*mG*mG*mC*mC*A*A | 2181 | XXXXXXXXX | 5-10-5 (2′-OMe- | HTT-rs362268 |
| | CAGCCUGCA | | *C*A*G*C*C*A*G*C*mC* | | XXXXXXXXXX | DNA-2′-OMe); | |
| | | | mU*mG*mC*mA | | | stereorandom PS | |
| WV-1044 | GGCCAACAGCC | 1830 | mG*mG*mC*mC*mA*A*C* | 2182 | XXXXXXXXX | 5-10-5 (2′-OMe- | HTT-rs362268 |
| | AGCCUGCAG | | A*G*C*C*A*G*C*C*mU* | | XXXXXXXXXX | DNA-2′-OMe); | |
| | | | mG*mC*mA*mG | | | stereorandom PS | |
| WV-1045 | GCCAACAGCCA | 1831 | mG*mC*mC*mA*mA*C*A* | 2183 | XXXXXXXXX | 5-10-5 (2′-OMe- | HTT-rs362268 |
| | GCCTGCAGG | | G*C*C*A*G*C*C*T*mG*m | | XXXXXXXXXX | DNA-2′-OMe); | |
| | | | C*mA*mG*mG | | | stereorandom PS | |
| WV-1046 | CCAACAGCCAG | 1832 | mC*mC*mA*mA*mC*A*G* | 2184 | XXXXXXXXX | 5-10-5 (2′-OMe- | HTT-rs362268 |
| | CCTGCAGGA | | C*C*A*G*C*C*T*G*mC*m | | XXXXXXXXXX | DNA-2′-OMe); | |
| | | | A*mG*mG*mA | | | stereorandom PS | |
| WV-1047 | CAACAGCCAGC | 1833 | mC*mA*mA*mC*mA*G*C* | 2185 | XXXXXXXXX | 5-10-5 (2′-OMe- | HTT-rs362268 |
| | CTGCAGGAG | | C*A*G*C*C*T*G*C*mA*m | | XXXXXXXXXX | DNA-2′-OMe); | |
| | | | G*mG*mA*mG | | | stereorandom PS | |
| WV-1048 | AACAGCCAGCC | 1834 | mA*mA*mC*mA*mG*C*C* | 2186 | XXXXXXXXX | 5-10-5 (2′-OMe- | HTT-rs362268 |
| | TGCAGGAGG | | A*G*C*C*T*G*C*A*mG*m | | XXXXXXXXXX | DNA-2′-OMe); | |
| | | | G*mA*mG*mG | | | stereorandom PS | |
| WV-1049 | GGGCCAACAGC | 1835 | mG*mG*mG*mC*mC*mA* | 2187 | XXXXXXXXX | 7-7-6 (2′-OMe- | HTT-rs362268 |
| | CAGCCUGCA | | mA*C*A*G*C*C*A*G*mC | | XXXXXXXXXX | DNA-2′-OMe); | |
| | | | *mC*mU*mG*mC*mA | | | stereorandom PS | |
| WV-1050 | GGGCCAACAGC | 1836 | mGmGmGmCmCmAmA*C* | 2188 | OOOOOOXXX | 7-7-6 (2′-OMe- | HTT-rs362268 |
| | CAGCCUGCA | | A*G*C*C*A*G*mCmCmU | | XXXXXOOOOO | DNA-2′-OMe); | |
| | | | mGmCmA | | | stereorandom PS; | |
| | | | | | | PO in wings | |
| WV-1051 | GGCCAACAGCC | 1837 | mG*mG*mC*mC*mA*mA* | 2189 | XXXXXXXXX | 6-7-5 (2′-OMe- | HTT-rs362268 |
| | AGCCUGCAG | | C*A*G*C*C*A*G*C*C*mU | | XXXXXXXXX | DNA-2′-OMe); | |
| | | | *mG*mC*mA*mG | | | stereorandom PS | |
| WV-1052 | GGCCAACAGCC | 1838 | mGmGmCmCmAmA*C*A* | 2190 | OOOOOXXXX | 6-7-5 (2′-OMe- | HTT-rs362268 |
| | AGCCUGCAG | | G*C*C*A*G*C*C*mUmGm | | XXXXXXOOOO | DNA-2′-OMe); | |
| | | | CmAmG | | | stereorandom PS; | |
| | | | | | | PO in the wings | |
| WV-1053 | GCCAACAGCCA | 1839 | mG*mC*mC*mA*mA*C*A* | 2191 | XXXXXXXXX | 5-7-8 (2′-OMe- | HTT-rs362268 |
| | GCCUGCAGG | | G*C*C*A*G*mC*mC*mU* | | XXXXXXXXXX | DNA-2′-OMe); | |
| | | | mG*mC*mA*mG*mG | | | stereorandom PS | |
| WV-1054 | GCCAACAGCCA | 1840 | mGmCmCmAmA*C*A*G*C | 2192 | OOOOXXXXX | 5-7-8 (2′-OMe- | HTT-rs362268 |
| | GCCUGCAGG | | *C*A*G*mCmCmUmGmCm | | XXXOOOOOOO | DNA-2′-OMe); | |
| | | | AmGmG | | | stereorandom PS; | |
| | | | | | | PO in the wings | |
| WV-1055 | GGGCCAACAGC | 1841 | mGmGmGmCmC*A*A*C*A | 2193 | OOOOXXXXX | 5-10-5 (2′-OMe- | HTT-rs362268 |
| | CAGCCUGCA | | *G*C*C*A*G*C*mCmUmG | | XXXXXXOOOO | DNA-2′-OMe); | |
| | | | mCmA | | | stereorandom PS; | |
| | | | | | | PO in the wings | |
| WV-1056 | GGCCAACAGCC | 1842 | mGmGmCmCmA*A*C*A*G | 2194 | OOOOXXXXX | 5-10-5 (2′-OMe- | DNA-2′-OMe); |
| | AGCCUGCAG | | *C*C*A*G*C*C*mUmGmC | | XXXXXXOOOO | DNA-2′-OMe); | |
| | | | mAmG | | | stereorandom PS; | |
| | | | | | | PO in the wings | |
| WV-1057 | GCCAACAGCCA | 1843 | mGmCmCmAmA*C*A*G*C | 2195 | OOOOXXXXX | 5-10-5 (2′-OMe- | HTT-rs362268 |
| | GCCTGCAGG | | *C*A*G*C*C*T*mGmCmA | | XXXXXXOOOO | DNA-2′-OMe); | |
| | | | mGmG | | | stereorandom PS; | |
| | | | | | | PO in the wings | |
| WV-1058 | CCAACAGCCAG | 1844 | mCmCmAmAmC*A*G*C*C | 2196 | OOOOXXXXX | 5-10-5 (2′-OMe- | HTT-rs362268 |
| | CCTGCAGGA | | *A*G*C*C*T*G*mCmAmG | | XXXXXXOOOO | DNA-2′-OMe); | |
| | | | mGmA | | | stereorandom PS; | |
| | | | | | | PO in the wings | |
| WV-1059 | CAACAGCCAGC | 1845 | mCmAmAmCmA*G*C*C*A | 2197 | OOOOXXXXX | 5-10-5 (2′-OMe- | HTT-rs362268 |
| | CTGCAGGAG | | *G*C*C*T*G*C*mAmGmG | | XXXXXXOOOO | DNA-2′-OMe); | |
| | | | mAmG | | | stereorandom PS; | |
| | | | | | | PO in the wings | |
| WV-1060 | AACAGCCAGCC | 1846 | mAmAmCmAmG*C*C*A*G | 2198 | OOOOXXXXX | 5-10-5 (2′-OMe- | HTT-rs362268 |
| | TGCAGGAGG | | *C*C*T*G*C*A*mGmGmA | | XXXXXXOOOO | DNA-2′-OMe); | |
| | | | mGmG | | | stereorandom PS; | |
| | | | | | | PO in the wings: | |
| WV-1061 | GUAGGAGTAGT | 1847 | mG*mU*mA*mG*mG*A*G | 2199 | XXXXXXXXX | 5-10-5 (2′-OMe- | HTT-rs362268 |
| | GAAAGGCCA | | *T*A*G*T*G*A*A*A*mG* | | XXXXXXXXXX | DNA-2′-OMe); | |
| | | | mG*mC*mC*mA | | | stereorandom PS: | |
| | | | | | | +ve Luciferase | |
| | | | | | | control for | |
| | | | | | | psiCHECK2; | |
| | | | | | | WV-975 | |
| | | | | | | analogue | |
| WV-1062 | GUAGGAGTAGT | 1848 | mGmUmAmGmG*A*G*T*A | 2200 | OOOOXXXXX | 5-10-5 (2′-OMe- | HTT-control |
| | GAAAGGCCA | | *G*T*G*A*A*A*mGmGmC | | XXXXXXOOOO | DNA-2′-OMe); | |
| | | | mCmA | | | stereorandom PS; | |
| | | | | | | PO in the wings: | |
| | | | | | | +ve Luciferase | |
| | | | | | | control for | |
| | | | | | | psiCHECK2; | |
| | | | | | | WV-975 | |
| | | | | | | analogue | |
| WV-1063 | GUAGGAGTAGT | 1849 | mG*mU*mA*mG*mG*A*G | 2201 | XXXXXXXXX | 5-15 (2′-OMe- | HTT-control |
| | GAAAGGCCA | | *T*A*G*T*G*A*A*A*G*G | | XXXXXXXXXX | DNA); | |
| | | | *C*C*A | | | stereorandom PS: | |
| | | | | | | +ve Luciferase | |
| | | | | | | control for | |
| | | | | | | psiCHECK2; | |
| | | | | | | WV-975 | |
| | | | | | | analogue | |
| WV-1064 | CUCUUACTGTG | 1850 | mC*mU*mC*mU*mU*A*C* | 2202 | XXXXXXXXX | 5-10-5 (2′-OMe- | HTT-control |
| | CTGTGGACA | | T*G*T*G*C*T*G*T*mG*m | | XXXXXXXXXX | DNA-2′-OMe); | |
| | | | G*mA*mC*mA | | | stereorandom PS: | |
| | | | | | | Negative | |
| | | | | | | Luciferase | |
| | | | | | | control for | |
| | | | | | | psiCHECK2; | |
| | | | | | | ONT-67 | |
| | | | | | | analogue | |
| WV-1065 | CUCUUACTGTG | 1851 | mCmUmCmUmU*A*C*T*G | 2203 | OOOOXXXXX | 5-10-5 (2′-OMe- | HTT-control |
| | CTGTGGACA | | *T*G*C*T*G*T*mGmGmA | | XXXXXXOOO | DNA-2′-OMe); | |
| | | | mCmA | | | stereorandom PS; | |
| | | | | | | PO in the wings: | |
| | | | | | | Negative | |
| | | | | | | Luciferase | |
| | | | | | | control for | |
| | | | | | | psiCHECK2; | |
| | | | | | | ONT-67 | |
| | | | | | | analogue | |
| WV-1066 | CUCUUACTGTG | 1852 | mC*mU*mC*mU*mU*A*C* | 2204 | XXXXXXXXX | 5-15 (2′-OMe- | HTT-control |
| | CTGTGGACA | | T*G*T*G*C*T*G*T*G*G* | | XXXXXXXXXX | DNA); | |
| | | | A*C*A | | | stereorandom PS: | |
| | | | | | | Negative | |
| | | | | | | Luciferase | |
| | | | | | | control for | |
| | | | | | | psiCHECK2; | |
| | | | | | | ONT-67 | |
| | | | | | | analogue | |
| WV-1067 | GGGCACAAGG | 1853 | G*G*G*C*A*C*A*A*G*G* | 2205 | XXXXXXXXX | All DNA | HTT-control |
| | GCACAGACTT | | G*C*d2AP*C*A*G*A*C*T*T | | XXXXXXXXXX | stereorandom; | |
| | | | | | | P13 (2- | |
| | | | | | | aminopurine): | |
| | | | | | | rs362307; WV- | |
| | | | | | | 904 analogue | |
| WV-1068 | GGCACAAGGGC | 1854 | G*G*C*A*C*A*A*G*G*G* | 2206 | XXXXXXXXX | All DNA | rs362307 |
| | ACAGACTTC | | C*d2AP*C*A*G*A*C*T*T*C | | XXXXXXXXXX | stereorandom; | |
| | | | | | | P12 (2- | |
| | | | | | | aminopurine): | |
| | | | | | | rs362307; WV- | |
| | | | | | | 905 analogue | |
| WV-1069 | GCACAAGGGCA | 1855 | G*C*A*C*A*A*G*G*G*C* | 2207 | XXXXXXXXX | All DNA | rs362307 |
| | CAGACTTCC | | d2AP*C*A*G*A*C*T*T*C*C | | XXXXXXXXXX | stereorandom; | |
| | | | | | | P11 (2- | |
| | | | | | | aminopurine): | |
| | | | | | | rs362307; WV- | |
| | | | | | | 906 analogue | |
| WV-1070 | GGGCACAAGG | 1856 | G*G*G*C*A*C*A*A*G*G* | 2208 | XXXXXXXXX | All DNA | rs362307 |
| | GCACAGACTT | | G*C*dDAP*C*A*G*A*C*T | | XXXXXXXXXX | stereorandom; | |
| | | | *T | | | P13 (2; 6- | |
| | | | | | | diaminopurine): | |
| | | | | | | rs362307; WV- | |
| | | | | | | 904 analogue | |
| WV-1071 | GGCACAAGGGC | 1857 | G*G*C*A*C*A*A*G*G*G* | 2209 | XXXXXXXXX | All DNA | rs362307 |
| | ACAGACTTC | | C*dDAP*C*A*G*A*C*T*T | | XXXXXXXXXx | stereorandom; | |
| | | | *C | | | P12 (2; 6- | |
| | | | | | | diaminopurine): | |
| | | | | | | rs362307; WV- | |
| | | | | | | 905 analogue | |
| WV-1072 | GCACAAGGGCA | 1858 | G*C*A*C*A*A*G*G*G*C* | 2210 | XXXXXXXXX | All DNA | rs362307 |
| | CAGACTTCC | | dDAP*C*A*G*A*C*T*T*C | | XXXXXXXXXX | stereorandom; | |
| | | | *C | | | P12 (2;6- | |
| | | | | | | diaminopurine): | |
| | | | | | | rs362307; WV- | |
| | | | | | | 906 analogue | |
| WV-1073 | GAGCCUUUGG | 1859 | rGrArGrCrCrUrUrUrGrGrAr | 2211 | OOOOOOOOO | wtRNA | rs362307 |
| | AAGUCUGCGCC | | ArGrUrCrUrGrCrGrCrCrCrU | | OOOOOOOOO | | |
| | CUUGUGCCCUG | | rUrGrUrGrCrCrCrUrGrCrCrU | | OOOOOOOOO | | |
| | CCU | | | | OOOOOOO | | |
| WV-1074 | GAGCCUUUGG | 1860 | rGrArGrCrCrUrUrUrGrGrAr | 2212 | OOOOOOOOO | muRNA | rs362307 |
| | AAGUCUGUGCC | | ArGrUrCrUrGrUrGrCrCrCrU | | OOOOOOOOO | | |
| | CUUGUGCCCUG | | rUrGrUrGrCrCrCrUrGrCrCrU | | OOOOOOOOO | | |
| | CCU | | | | OOOOOOO | | |
| WV-1075 | CACACGGGCAC | 1861 | rCrArCrArCrGrGrGrCrArCr | 2213 | OOOOOOOOO | Antisense strand: | rs362307 |
| | AGACUUCCAA | | ArGrArCrUrUrCrCrArA | | OOOOOOOOO | Positive control; | |
| | | | | | OO | Curr. Bio. Vol 19 | |
| | | | | | | No 9; 776 | |
| WV-1076 | GGAAGUCUGU | 1862 | rGrGrArArGrUrCrUrGrUrGr | 2214 | OOOOOOOOO | Sense strand: | rs362307 |
| | GCCCGUGUGCC | | CrCrCrGrUrGrUrGrCrC | | OOOOOOOOO | Positive control; | |
| | | | | | OO | Curr. Bio. Vol 19 | |
| | | | | | | No 9; 777: Note: | |
| | | | | | | incorrectly added | |
| | | | | | | as | |
| | | | | | | rGrGrArArGrUr | |
| | | | | | | CrUrGrUrGrCrC | |
| | | | | | | rCrGrUrGrUrUr | |
| | | | | | | CrC (SEQ ID | |
| | | | | | | NO: 2417) in | |
| | | | | | | earlier versions | |
| | | | | | | of databse | |
| WV-1077 | AUUAAUAAATT | 1863 | mA*SmU*SmU*SmA*SmA* | 2215 | SSSSSSSSSSSS | 6-10-4 (2′-OMe- | HTT rs7685686 |
| | GTCATCACC | | SmU*SA*SA*SA*ST*ST*S | | SRSSSSS | DNA-2′-OMe) | |
| | | | G*ST*SC*RA*ST*SmC*Sm | | | Gapmer: | |
| | | | A*SmC*SmC | | | Analogue of | |
| | | | | | | WV-451 | |
| WV-1078 | AUUAAUAAATT | 1864 | mA*RmU*RmU*RmA*RmA | 2216 | RRRRRSSSSSS | 6-10-4 (2′-OMe- | HTT rs7685686 |
| | GTCATCACC | | *RmU*SA*SA*SA*ST*ST* | | SSRSSRRR | DNA-2′-OMe) | |
| | | | SG*ST*SC*RA*ST*SmC*R | | | Gapmer: | |
| | | | mA*RmC*RmC | | | Analogue of | |
| | | | | | | WV-451 | |
| WV-1079 | AUUAAUAAATT | 1865 | mA*SmU*SmU*SmA*SmA* | 2217 | SSSSSSSSSSSS | 8-12 (2′-OMe- | HTT rs7685686 |
| | GTCATCACC | | SmU*SmA*SmA*SA*ST*ST | | SRSSSSS | DNA) hemimer: | |
| | | | *SG*ST*SC*RA*ST*SC*SA | | | Analogue of | |
| | | | *SC*SC | | | WV-451 | |
| WV-1080 | AUUAAUAAATT | 1866 | mA*RmU*RmU*RmA*RmA | 2218 | RRRRRRRSSSS | 8-12 (2′-OMe- | HTT rs7685686 |
| | GTCATCACC | | *RmU*RmA*RmA*SA*ST* | | SSRSSSSS | DNA) hemimer: | |
| | | | ST*SG*ST*SC*RA*ST*SC* | | | Analogue of | |
| | | | SA*SC*SC | | | WV-451 | |
| WV-1081 | AUUAAUAAATT | 1867 | mAmUmUmAmAmUmAmA | 2219 | OOOOOOOSSS | 8-12 (2′-OMe- | HTT rs7685686 |
| | GTCATCACC | | *SA*ST*ST*SG*ST*SC*RA | | SSSRSSSSS | DNA) hemimer; | |
| | | | *ST*SC*SA*SC*SC | | | PO wing: | |
| | | | | | | Analogue of | |
| | | | | | | WV-451 | |
| WV-1082 | AUUAAUAAATT | 1868 | mAmUmUmAmAmU*SA*S | 2220 | OOOOOSSSSSS | 6-10-4 (2′-OMe- | HTT rs7685686 |
| | GTCATCACC | | A*SA*ST*ST*SG*ST*SC*R | | SSRSSOOO | DNA-2′-OMe); | |
| | | | A*ST*SmCmAmCmC | | | PO wings: | |
| | | | | | | Analogue of | |
| | | | | | | WV-451 | |
| WV-1083 | AUUAAUAAATT | 1869 | mA*SmUmUmAmAmU*SA | 2221 | SOOOOSSSSSS | 6-10-4 (2′-OMe- | HTT rs7685686 |
| | GTCATCACC | | *SA*SA*ST*ST*SG*ST*SC | | SSRSSOOS | DNA-2′-OMe) | |
| | | | *RA*ST*SmCmAmC*SmC | | | Gapmer: | |
| | | | | | | Analogue of | |
| | | | | | | WV-451 | |
| WV-1084 | AUUAAUAAATT | 1870 | mA*RmUmUmAmAmU*SA | 2222 | ROOOOSSSSSS | 6-10-4 (2′-OMe- | HTT rs7685686 |
| | GTCATCACC | | *SA*SA*ST*ST*SG*ST*SC | | SSRSSOOR | DNA-2′-OMe) | |
| | | | *RA*ST*SmCmAmC*RmC | | | Gapmer: | |
| | | | | | | Analogue of | |
| | | | | | | WV-451 | |
| WV-1085 | GGCACAAGGGC | 1871 | mG*SmG*SmC*SmA*SmC* | 2223 | SSSSSSSSSSSS | 5-10-5 (2′-OMe- | HTT rs362307 |
| | ACAGACUUC | | SA*SA*SG*SG*SG*SC*SA | | RSSSSSS | DNA-2′-OMe) | |
| | | | *SC*RA*SG*SmA*SmC*Sm | | | Gapmer: | |
| | | | U*SmU*SmC | | | Analogue of | |
| | | | | | | WV-905 and | |
| | | | | | | WV-937 | |
| WV-1086 | GGCACAAGGGC | 1872 | mG*RmG*RmC*RmA*RmC | 2224 | RRRRSSSSSSS | 5-10-5 (2′-OMe- | HTT rs362307 |
| | ACAGACUUC | | *SA*SA*SG*SG*SG*SC*S | | SRSSRRRR | DNA-2′-OMe) | |
| | | | A*SC*RA*SG*SmA*RmC* | | | Gapmer: | |
| | | | RmU*RmU*RmC | | | Analogue of | |
| | | | | | | WV-905 and | |
| | | | | | | WV-937 | |
| WV-1087 | GGCACAAGGGC | 1873 | mGmGmCmAmC*SA*SA*S | 2225 | OOOOSSSSSSS | 5-10-5 (2′-OMe- | HTT rs362307 |
| | ACAGACUUC | | G*SG*SG*SC*SA*SC*RA* | | SRSSOOOO | DNA-2′-OMe); | |
| | | | SG*SmAmCmUmUmC | | | PO wings: | |
| | | | | | | Analogue of | |
| | | | | | | WV-905 and | |
| | | | | | | WV-937 | |
| WV-1088 | GGCACAAGGGC | 1874 | mG*SmG*SmC*SmA*SmC* | 2226 | SSSSSSSSSSSS | 8-12 (2′-OMe- | HTT rs362307 |
| | ACAGACTTC | | SmA*SmA*SmG*SG*SG*S | | RSSSSSS | DNA) hemimer: | |
| | | | C*SA*SC*RA*SG*SA*SC* | | | Analogue of | |
| | | | ST*ST*SC | | | WV-905 and | |
| | | | | | | WV-937 | |
| WV-1089 | GGCACAAGGGC | 1875 | mG*RmG*RmC*RmA*RmC | 2227 | RRRRRRRSSSS | 8-12 (2′-OMe- | HTT rs362307 |
| | ACAGACTTC | | *RmA*RmA*RmG*SG*SG* | | SRSSSSSS | DNA) hemimer: | |
| | | | SC*SA*SC*RA*SG*SA*SC | | | Analogue of | |
| | | | *ST*ST*SC | | | WV-905 and | |
| | | | | | | WV-937 | |
| WV-1090 | GGCACAAGGGC | 1876 | mGmGmCmAmCmAmAmG | 2228 | OOOOOOOSSS | 8-12 (2′-OMe- | HTT rs362307 |
| | ACAGACTTC | | *SG*SG*SC*SA*SC*RA*S | | SSRSSSSSS | DNA) hemimer; | |
| | | | G*SA*SC*ST*ST*SC | | | PO wing: | |
| | | | | | | Analogue of | |
| | | | | | | WV-905 and | |
| | | | | | | WV-937 | |
| WV-1091 | GGCACAAGGGC | 1877 | mG*RmGmCmAmC*SA*SA | 2229 | ROOOSSSSSSS | 8-12 (2′-OMe- | HTT rs362307 |
| | ACAGACUUC | | *SG*SG*SG*SC*SA*SC*R | | SRSSOOOR | DNA) gapmer | |
| | | | A*SG*SmAmCmUmU*RmC | | | PO wing: | |
| | | | | | | Analogue of | |
| | | | | | | WV-905 and | |
| | | | | | | WV-937: | |
| | | | | | | incorrectly added | |
| | | | | | | as | |
| | | | | | | gsSgcacsSdAsSd | |
| | | | | | | AsSdGsSdGsSd | |
| | | | | | | GsSdCsSdAsSd | |
| | | | | | | CsRdAsSdGsSac | |
| | | | | | | uusSc (SEQ ID | |
| | | | | | | NO: 2418) in | |
| | | | | | | earlier version of | |
| | | | | | | database | |
| WV-1092 | GGCACAAGGGC | 1878 | mG*SmGmCmAmC*SA*SA | 2230 | SOOOSSSSSSS | 8-12 (2′-OMe- | HTT rs362307 |
| | ACAGACUUC | | *SG*SG*SG*SC*SA*SC*R | | SRSSOOOS | DNA) gapmer | |
| | | | A*SG*SmAmCmUmU*SmC | | | PO wing: | |
| | | | | | | Analogue of | |
| | | | | | | WV-905 and | |
| | | | | | | WV-937 | |
| WV-1183 | GCAGGGCACAA | 1879 | G*C*A*G*G*G*C*A*C*A* | 2231 | XXXXXXXXX | Phosphorothioate | Huntington |
| | GGGCACAGA | | A*G*G*G*C*A*C*A*G*A | | XXXXXXXXXX | DNA; | rs362307 |
| | | | | | | Stereorandom | |
| WV-1184 | GCAGGGCACAA | 1880 | mG*mC*mA*mG*mG*G*C | 2232 | XXXXXXXXX | 5-15 (2′-OMe- | Huntington |
| | GGGCACAGA | | *A*C*A*A*G*G*G*C*A*C | | XXXXXXXXXX | DNA) Hemimer | rs362307 |
| | | | *A*G*A | | | | |
| WV-1185 | GCAGGGCACAA | 1881 | mGmCmAmGmG*G*C*A*C | 2233 | OOOOXXXXX | 5-15 (2′-OMe- | Huntington |
| | GGGCACAGA | | *A*A*G*G*G*C*A*C*A*G | | XXXXXXXXXX | DNA) Hemimer; | rs362307 |
| | | | *A | | | PO wing | |
| WV-1186 | GCAGGGCACAA | 1882 | mG*mC*mA*mG*mG*mG* | 2234 | XXXXXXXXX | 7-13 (2′-OMe- | Huntington |
| | GGGCACAGA | | mC*A*C*A*A*G*G*G*C* | | XXXXXXXXXX | DNA) Hemimer | rs362307 |
| | | | A*C*A*G*A | | | | |
| WV-1187 | GCAGGGCACAA | 1883 | mGmCmAmGmGmGmC*A* | 2235 | OOOOOOXXX | 7-13 (2′-OMe- | Huntington |
| | GGGCACAGA | | C*A*A*G*G*G*C*A*C*A* | | XXXXXXXXXX | DNA) Hemimer; | rs362307 |
| | | | G*A | | | PO wing | |
| WV-1188 | CAGGGCACAAG | 1884 | C*A*G*G*G*C*A*C*A*A* | 2236 | XXXXXXXXX | Phosphorothioate | Huntington |
| | GGCACAGAC | | G*G*G*C*A*C*A*G*A*C | | XXXXXXXXXX | DNA; | rs362307 |
| | | | | | | Stereorandom | |
| WV-1189 | CAGGGCACAAG | 1885 | mC*mA*mG*mG*mG*C*A | 2237 | XXXXXXXXX | 5-15 (2′-OMe- | Huntington |
| | GGCACAGAC | | *C*A*A*G*G*G*C*A*C*A | | XXXXXXXXXX | DNA) Hemimer | rs362307 |
| | | | *G*A*C | | | | |
| WV-1190 | CAGGGCACAAG | 1886 | mCmAmGmGmG*C*A*C*A | 2238 | OOOOXXXXX | 5-15 (2′-OMe- | Huntington |
| | GGCACAGAC | | *A*G*G*G*C*A*C*A*G*A | | XXXXXXXXXX | DNA) Hemimer; | rs362307 |
| | | | *C | | | PO wing | |
| WV-1191 | CAGGGCACAAG | 1887 | mC*mA*mG*mG*mG*mC* | 2239 | XXXXXXXXX | 7-13 (2′-OMe- | Huntington |
| | GGCACAGAC | | mA*C*A*A*G*G*G*C*A* | | XXXXXXXXXX | DNA) Hemimer | rs362307 |
| | | | mC*mA*mG*mA*mC | | | | |
| WV-1192 | CAGGGCACAAG | 1888 | mCmAmGmGmGmCmA*C* | 2240 | OOOOOOXXX | 7-13 (2′-OMe- | Huntington |
| | GGCACAGAC | | A*A*G*G*G*C*A*mCmAm | | XXXXXXOOOO | DNA) Hemimer; | rs362307 |
| | | | GmAmC | | | PO wing | |
| WV-1193 | AGGGCACAAG | 1889 | A*G*G*G*C*A*C*A*A*G* | 2241 | XXXXXXXXX | Phosphorothioate | Huntington |
| | GGCACAGACT | | G*G*C*A*C*A*G*A*C*T | | XXXXXXXXXX | DNA; | rs362307 |
| | | | | | | Stereorandom | |
| WV-1194 | AGGGCACAAG | 1890 | mA*mG*mG*mG*mC*A*C | 2242 | XXXXXXXXX | 5-15 (2′-OMe- | Huntington |
| | GGCACAGACT | | *A*A*G*G*G*C*A*C*A*G | | XXXXXXXXXX | DNA) Hemimer | rs362307 |
| | | | *A*C*T | | | | |
| WV-1195 | AGGGCACAAG | 1891 | mAmGmGmGmC*A*C*A*A | 2243 | OOOOXXXXX | 5-15 (2′-OMe- | Huntington |
| | GGCACAGACT | | *G*G*G*C*A*C*A*G*A*C | | XXXXXXXXXX | DNA) Hemimer; | rs362307 |
| | | | *T | | | PO wing | |
| WV-1196 | AGGGCACAAG | 1892 | mA*mG*mG*mG*mC*mA* | 2244 | XXXXXXXXX | 7-12-1 (2′-OMe- | Huntington |
| | GGCACAGACU | | mC*A*A*G*G*G*C*A*C* | | XXXXXXXXXX | DNA-2′-DNA) | rs362307 |
| | | | A*G*A*C*mU | | | Gapmer | |
| WV-1197 | AGGGCACAAG | 1893 | mAmGmGmGmCmAmC*A* | 2245 | OOOOOOXXX | 7-12-1 (2′-OMe- | Huntington |
| | GGCACAGACU | | A*G*G*G*C*A*C*A*G*A* | | XXXXXXXXXX | DNA-2′-DNA) | rs362307 |
| | | | C*mU | | | Gapmer; PO | |
| | | | | | | wings | |
| WV-1198 | AAGGGCACAG | 1894 | A*A*G*G*G*C*A*C*A*G* | 2246 | XXXXXXXXX | Phosphorothioate | Huntington |
| | ACTTCCAAAG | | A*C*T*T*C*C*A*A*A*G | | XXXXXXXXXX | DNA | rs362307 |
| | | | | | | Stereorandom | |
| WV-1199 | AAGGGCACAG | 1895 | mA*mA*mG*mG*mG*C*A | 2247 | XXXXXXXXX | 5-15 (2′-OMe- | Huntington |
| | ACTTCCAAAG | | *C*A*G*A*C*T*T*C*C*A* | | XXXXXXXXXX | DNA) Hemimer | rs362307 |
| | | | A*A*G | | | | |
| WV-1200 | AAGGGCACAG | 1896 | mAmAmGmGmG*C*A*C*A | 2248 | OOOOXXXXX | 5-15 (2′-OMe- | Huntington |
| | ACTTCCAAAG | | *G*A*C*T*T*C*C*A*A*A | | XXXXXXXXXX | DNA) Hemimer; | rs362307 |
| | | | *G | | | PO wing | |
| WV-1201 | AAGGGCACAG | 1897 | mA*mA*mG*mG*mG*C*A | 2249 | XXXXXXXXX | 5-10-5 (2′-OMe- | Huntington |
| | ACTTCCAAAG | | *C*A*G*A*C*T*T*C*mC* | | XXXXXXXXXX | DNA-2′-DNA) | rs362307 |
| | | | mA*mA*mA*mG | | | Gapmer | |
| WV-1202 | AAGGGCACAG | 1898 | mAmAmGmGmG*C*A*C*A | 2250 | OOOOXXXXX | 5-10-5 (2′-OMe- | Huntington |
| | ACTTCCAAAG | | *G*A*C*T*T*C*mCmAmA | | XXXXXXOOOO | DNA-2′-DNA) | rs362307 |
| | | | mAmG | | | Gapmer; PO | |
| | | | | | | wings | |
| WV-1203 | AAGGGCACAG | 1899 | mA*mA*mG*mG*G*C*A*C | 2251 | XXXXXXXXX | 4-10-6 (2′-OMe- | Huntington |
| | ACTTCCAAAG | | *A*G*A*C*T*T*mC*mC*m | | XXXXXXXXXX | DNA-2′-DNA) | rs362307 |
| | | | A*mA*mA*mG | | | Gapmer | |
| WV-1204 | AAGGGCACAG | 1900 | mAmAmGmGG*C*A*C*A* | 2252 | OOOOXXXXX | 4-10-6 (2′-OMe- | Huntington |
| | ACTTCCAAAG | | G*A*C*T*T*mCmCmAmA | | XXXXXOOOOO | DNA-2′-DNA) | rs362307 |
| | | | mAmG | | | Gapmer; PO | |
| | | | | | | wings | |
| WV-1205 | AGGGCACAGAC | 1901 | A*G*G*G*C*A*C*A*G*A* | 2253 | XXXXXXXXX | Phosphorothioate | Huntington |
| | TTCCAAAGG | | C*T*T*C*C*A*A*A*G*G | | XXXXXXXXXX | DNA; | rs362307 |
| | | | | | | Stereorandom | |
| WV-1206 | AGGGCACAGAC | 1902 | mA*mG*mG*mG*mC*A*C | 2254 | XXXXXXXXX | 5-15 (2′-OMe- | Huntington |
| | TTCCAAAGG | | *A*G*A*C*T*T*C*C*A*A | | XXXXXXXXXX | DNA) Hemimer | rs362307 |
| | | | *A*G*G | | | | |
| WV-1207 | AGGGCACAGAC | 1903 | mAmGmGmGmC*A*C*A*G | 2255 | OOOOXXXXX | 5-15 (2′-OMe- | Huntington |
| | TTCCAAAGG | | *A*C*T*T*C*C*A*A*A*G | | XXXXXXXXXX | DNA) Hemimer; | rs362307 |
| | | | *G | | | PO wing | |
| WV-1208 | AGGGCACAGAC | 1904 | mA*mG*mG*mG*mC*A*C | 2256 | XXXXXXXXX | 5-10-5 (2′-OMe- | Huntington |
| | TTCCAAAGG | | *A*G*A*C*T*T*C*C*mA* | | XXXXXXXXXX | DNA-2′-DNA) | rs362307 |
| | | | mA*mA*mG*mG | | | Gapmer | |
| WV-1209 | AGGGCACAGAC | 1905 | mAmGmGmGmC*A*C*A*G | 2257 | OOOOXXXXX | 5-10-5 (2′-OMe- | Huntington |
| | TTCCAAAGG | | *A*C*T*T*C*C*mAmAmA | | XXXXXXOOOO | DNA-2′-DNA) | rs362307 |
| | | | mGmG | | | Gapmer; PO | |
| | | | | | | wings | |
| WV-1210 | AGGGCACAGAC | 1906 | mA*mG*mG*mG*C*A*C*A | 2258 | XXXXXXXXX | 4-10-6 (2′-OMe- | Huntington |
| | TTCCAAAGG | | *G*A*C*T*T*C*mC*mA*m | | XXXXXXXXXX | DNA-2′-DNA) | rs362307 |
| | | | A*mA*mG*mG | | | Gapmer | |
| WV-1211 | AGGGCACAGAC | 1907 | mAmGmGmG*C*A*C*A*G | 2259 | OOOXXXXXX | 4-10-6 (2′-OMe- | Huntington |
| | TTCCAAAGG | | *A*C*T*T*C*mCmAmAmA | | XXXXXOOOOO | DNA-2′-DNA) | rs362307 |
| | | | mGmG | | | Gapmer; PO | |
| | | | | | | wings | |
| WV-1212 | GGGCACAGACT | 1908 | G*G*G*C*A*C*A*G*A*C* | 2260 | XXXXXXXXX | Phosphorothioate | Huntington |
| | TCCAAAGGC | | T*T*C*C*A*A*A*G*G*C | | XXXXXXXXXX | DNA; | rs362307 |
| | | | | | | Stereorandom | |
| WV-1213 | GGGCACAGACT | 1909 | mG*mG*mG*mC*mA*C*A | 2261 | XXXXXXXXX | 4-16 (2′-OMe- | Huntington |
| | TCCAAAGGC | | *G*A*C*T*T*C*C*A*A*A | | XXXXXXXXXX | DNA) Hemimer | rs362307 |
| | | | *G*G*C | | | | |
| WV-1214 | GGGCACAGACT | 1910 | mGmGmGmCmA*C*A*G*A | 2262 | OOOOXXXXX | 4-16 (2′-OMe- | Huntington |
| | TCCAAAGGC | | *C*T*T*C*C*A*A*A*G*G | | XXXXXXXXXX | DNA) Hemimer; | rs362307 |
| | | | *C | | | PO wing | |
| WV-1215 | GGGCACAGACT | 1911 | mG*mG*mG*mC*mA*C*A | 2263 | XXXXXXXXX | 4-10-6 (2′-OMe- | Huntington |
| | TCCAAAGGC | | *G*A*C*T*T*C*C*A*mA* | | XXXXXXXXXX | DNA-2′-DNA) | rs362307 |
| | | | mA*mG*mG*mC | | | Gapmer | |
| WV-1216 | GGGCACAGACT | 1912 | mGmGmGmCmA*C*A*G*A | 2264 | OOOOXXXXX | 4-10-6 (2′-OMe- | Huntington |
| | TCCAAAGGC | | *C*T*T*C*C*A*mAmAmG | | XXXXXXOOOO | DNA-2′-DNA) | rs362307 |
| | | | mGmC | | | Gapmer; PO | |
| | | | | | | wings | |
| WV-1234 | GGCACAAGGGC | 1913 | mG*mG*mC*mA*mC*A*A | 2265 | XXXXXXXXX | 5-10-5 (2′-OMe- | HTT-rs362307 |
| | ACAGACUTC | | *G*G*G*C*A*C*A*G*mA* | | XXXXXXXXXX | DNA-2′-OMe) | |
| | | | mC*mU*BrdU*mC | | | Gapmer; One Br- | |
| | | | | | | dU | |
| WV-1235 | GGCACAAGGGC | 1914 | mG*mG*mC*mA*mC*A*A | 2266 | XXXXXXXXX | 5-10-5 (2′-OMe- | HTT-rs362307 |
| | ACAGACTTC | | *G*G*G*C*A*C*A*G*mA* | | XXXXXXXXXX | DNA-2′-OMe) | |
| | | | mC*BrdU*BrdU*mC | | | Gapmer; two Br- | |
| | | | | | | dU | |
| WV-1497 | GGCACAAGGGC | 1915 | mG*mGmCmAmC*A*A*G* | 2267 | XOOOXXXXX | stereo random | HTT rs362307 |
| | ACAGACUUC | | G*G*C*A*C*A*G*mAmCm | | XXXXXXOOOX | version of WV- | |
| | | | UmU*mC | | | 1092 | |
| WV-1508 | AUUAAUAAATT | 1916 | A*SmUmUmAmAmU*SA*S | 2268 | SOOOOSSSSSS | 1-5-10-3-1 | HTT rs7685686 |
| | GTCATCACC | | A*SA*ST*ST*SG*ST*SC*R | | SSRSSOOS | (DNA/2′-OMe) | |
| | | | A*ST*SmCmAmC*SC | | | Gapmer:: | |
| | | | | | | Analogue of | |
| | | | | | | WV-1083 | |
| WV-1509 | AUUAAUAAATT | 1917 | A*mUmUmAmAmU*A*A* | 2269 | XOOOOXXXX | 1-5-10-3-1 | HTT rs7685686 |
| | GTCATCACC | | A*T*T*G*T*C*A*T*mCmA | | XXXXXXXOOX | (DNA/2′-OMe) | |
| | | | mC*C | | | Gapmer; 1st and | |
| | | | | | | last PS:: | |
| | | | | | | Analogue of | |
| | | | | | | WV-1083 | |
| WV-1510 | GGCACAAGGGC | 1918 | G*SmGmCmAmC*SA*SA*S | 2270 | SOOOSSSSSSS | 1-4-10-4-1 | HTT rs362307 |
| | ACAGACUUC | | G*SG*SG*SC*SA*SC*RA* | | SRSSOOOS | (DNA/2′-OMe) | |
| | | | SG*SmAmCmUmU*SC | | | gapmer:: | |
| | | | | | | Analogue of | |
| | | | | | | WV-1092 | |
| WV-1511 | GGCACAAGGGC | 1919 | G*mGmCmAmC*A*A*G*G | 2271 | XOOOXXXXX | 1-4-10-4-1 | HTT rs362307 |
| | ACAGACUUC | | *G*C*A*C*A*G*mAmCmU | | XXXXXXOOOX | (DNA/2′-OMe) | |
| | | | mU*C | | | gapmer; 1st and | |
| | | | | | | last PS:: | |
| | | | | | | Analogue of | |
| | | | | | | WV-1092 | |
| WV-1654 | GGCACAAGGGC | 1920 | Geo*Geo*m5Ceo*Aeo*m5Ce | 2272 | XXXXXXXXX | 5-10-5; 2′- | HTT rs362307 |
| | ACAGACTTC | | o*A*A*G*G*G*C*A*C*A* | | XXXXXXXXXX | OMOE gapmer; | |
| | | | G*Aeo*m5Ceo*Teo*Teo*m5 | | | All PS | |
| | | | Ceo | | | | |
| WV-1655 | GGCACAAGGGC | 1921 | Geo*Geom5CeoAeom5Ceo* | 2273 | XOOOXXXXX | 5-10-5; 2′- | HTT rs362307 |
| | ACAGACTTC | | A*A*G*G*G*C*A*C*A*G* | | XXXXXXOOOX | OMOE gapmer; | |
| | | | Aeom5CeoTeoTeo*m5Ceo | | | 1st and last PS in | |
| | | | | | | the wing; rest of | |
| | | | | | | the wing is PO | |
| WV-1656 | CTCAGTAACAT | 1922 | m5Ceo*Teo*m5Ceo*Aeo*Ge | 2274 | XXXXXXXXX | 5-10-5; 2′- | Huntington |
| | TGACACCAC | | o*T*A*A*C*A*T*T*G*A*C | | XXXXXXXXXX | OMOE gapmer; | |
| | | | *Aeo*m5Ceo*m5Ceo*Aeo* | | | All PS | |
| | | | m5Ceo | | | | |
| WV-1657 | CUCAGTAACAT | 1923 | mC*mU*mC*mA*mG*T*A* | 2275 | XXXXXXXXX | 5-10-5; 2′-OMe | Huntington |
| | TGACACCAC | | A*C*A*T*T*G*A*C*mA*m | | XXXXXXXXXX | gapmer; All PS | |
| | | | C*mC*mA*mC | | | | |
| WV-1788 | GGCACAAGGGC | 1924 | mG*mGmCmAmC*A*A*G* | 2276 | XOOOXXXXX | 5/10/5 2′Ome | HTT |
| | ACAGACUTC | | G*G*C*A*C*A*G*mAmCm | | XXXXXXOOXX | Gapmer BrdU | |
| | | | U*BrdU*mC | | | PO wings | |
| WV-1789 | CTCAGTAACAT | 1925 | mC*BrdU*mC*mA*mG*T* | 2277 | XXXXXXXXX | 5/10/5 2′Ome | HTT |
| | TGACACCAC | | A*A*C*A*T*T*G*A*C*mA | | XXXXXXXXX | Gapmer BrdU | |
| | | | *mC*mC*mA*mC | | | | |
| WV-1790 | CTCAGTAACAT | 1926 | mC*BrdU*mCmAmG*T*A* | 2278 | XXOOXXXXX | 5/10/5 2′Ome | HTT |
| | TGACACCAC | | A*C*A*T*T*G*A*C*mAm | | XXXXXXOOOX | Gapmer BrdU | |
| | | | CmCmA*mC | | | PO wings | |
| WV-1799 | GAAGUCUGUG | 1927 | rGrArArGrUrCrUrGrUrGrCr | 2279 | OOOOOOOOO | RNA | HTT |
| | CCCUUGUGCC | | CrCrUrUrGrUrGrCrC | | OOOOOOOOOO | complementary | |
| | | | | | | to WV1092 | |
| WV-2022 | GGCACAAGGGC | 1928 | mG*SmGmCmAmC*SA*SA | 2280 | SOOOSSSSSSS | BrdU version of | HTT rs362307 |
| | ACAGACUTC | | *SG*SG*SG*SC*SA*SC*R | | SRSSOOSS | WV-1092 | |
| | | | A*SG*SmAmCmU*SBrdU* | | | | |
| | | | SmC | | | | |
| WV-2023 | TGTCATCACCA | 1929 | T*G*T*C*A*T*C*A*C*C* | 2281 | XXXXXXXXX | 15-5 hemimer | rs7685686 |
| | GAAAAAGUC | | A*G*A*A*A*mA*mA*mG* | | XXXXXXXXXX | full PS | (A/G) |
| | | | mU*mC | | | | |
| WV-2024 | UTGTCATCACC | 1930 | mU*T*G*T*C*A*T*C*A*C | 2282 | XXXXXXXXX | 1-14-5 gapmer | rs7685686 |
| | AGAAAAAGU | | *C*A*G*A*A*mA*mA*mA | | XXXXXXXXXX | full PS | (A/G) |
| | | | *mG*mU | | | | |
| WV-2025 | TTGTCATCACC | 1931 | T*T*G*T*C*A*T*C*A*C*C | 2283 | XXXXXXXXX | 15-5 hemimer | rs7685686 |
| | AGAAAAAGU | | *A*G*A*A*mA*mA*mA*m | | XXXXXXXXXX | full PS | (A/G) |
| | | | G*mU | | | | |
| WV-2026 | AUTGTCATCAC | 1932 | mA*mU*T*G*T*C*A*T*C* | 2284 | XXXXXXXXX | 2-13-5 gapmer | rs7685686 |
| | CAGAAAAAG | | A*C*C*A*G*A*mA*mA*m | | XXXXXXXXXX | full PS | (A/G) |
| | | | A*mA*mG | | | | |
| WV-2027 | ATTGTCATCAC | 1933 | mA*T*T*G*T*C*A*T*C*A | 2285 | XXXXXXXXX | 1-14-5 gapmer | rs7685686 |
| | CAGAAAAAG | | *C*C*A*G*A*mA*mA*mA | | XXXXXXXXXX | full PS | (A/G) |
| | | | *mA*mG | | | | |
| WV-2028 | AAUTGTCATCA | 1934 | mA*mA*mU*T*G*T*C*A* | 2286 | XXXXXXXXX | 3-12-5 gapmer | rs7685686 |
| | CCAGAAAAA | | T*C*A*C*C*A*G*mA*mA* | | XXXXXXXXXX | full PS | (A/G) |
| | | | mA*mA*mA | | | | |
| WV-2029 | AATTGTCATCA | 1935 | mA*mA*T*T*G*T*C*A*T* | 2287 | XXXXXXXXX | 2-13-5 gapmer | rs7685686 |
| | CCAGAAAAA | | C*A*C*C*A*G*mA*mA*m | | XXXXXXXXX | full PS | (A/G) |
| | | | A*mA*mA | | | | |
| WV-2030 | AAATTGTCATC | 1936 | mA*mA*mA*T*T*G*T*C* | 2288 | XXXXXXXXX | 3-12-5 gapmer | rs7685686 |
| | ACCAGAAAA | | A*T*C*A*C*C*A*mG*mA* | | XXXXXXXXXX | full PS | (A/G) |
| | | | mA*mA*mA | | | | |
| WV-2031 | AAAUTGTCATC | 1937 | mA*mA*mA*mU*T*G*T*C | 2289 | XXXXXXXXX | 4-11-5 gapmer | rs7685686 |
| | ACCAGAAAA | | *A*T*C*A*C*C*A*mG*mA | | XXXXXXXXXX | full PS | (A/G) |
| | | | *mA*mA*mA | | | | |
| WV-2032 | UAAAUTGTCAT | 1938 | mU*mA*mA*mA*mU*T*G* | 2290 | XXXXXXXXX | 5-11-4 gapmer | rs7685686 |
| | CACCAGAAA | | T*C*A*T*C*A*C*C*A*mG | | XXXXXXXXXX | full PS | (A/G) |
| | | | *mA*mA*mA | | | | |
| WV-2033 | UAAAUTGTCAT | 1939 | mU*mA*mA*mA*mU*T*G* | 2291 | XXXXXXXXX | 5-10-5 gapmer | rs7685686 |
| | CACCAGAAA | | T*C*A*T*C*A*C*C*mA*m | | XXXXXXXXXX | full PS | (A/G) |
| | | | G*mA*mA*mA | | | | |
| WV-2034 | AUAAATTGTCA | 1940 | mA*mU*mA*mA*mA*T*T* | 2292 | XXXXXXXXX | 5-11-4 gapmer | rs7685686 |
| | TCACCAGAA | | G*T*C*A*T*C*A*C*C*mA | | XXXXXXXXXX | full PS | (A/G) |
| | | | *mG*mA*mA | | | | |
| WV-2035 | AUAAATTGTCA | 1941 | mA*mU*mA*mA*mA*T*T* | 2293 | XXXXXXXXX | 5-10-5 gapmer | rs7685686 |
| | TCACCAGAA | | G*T*C*A*T*C*A*C*mC*m | | XXXXXXXXXX | full PS | (A/G) |
| | | | A*mG*mA*mA | | | | |
| WV-2036 | AAUAAATTGTC | 1942 | mA*mA*mU*mA*mA*A*T* | 2294 | XXXXXXXXX | 5-12-3 gapmer | rs7685686 |
| | ATCACCAGA | | T*G*T*C*A*T*C*A*C*C* | | XXXXXXXXXX | full PS | (A/G) |
| | | | mA*mG*mA | | | | |
| WV-2037 | AAUAAATTGTC | 1943 | mA*mA*mU*mA*mA*A*T* | 2295 | XXXXXXXXX | 5-11-4 gapmer | rs7685686 |
| | ATCACCAGA | | T*G*T*C*A*T*C*A*C*mC | | XXXXXXXXXX | full PS | (A/G) |
| | | | *mA*mG*mA | | | | |
| WV-2038 | AAUAAATTGTC | 1944 | mA*mA*mU*mA*mA*A*T* | 2296 | XXXXXXXXX | 5-10-5 gapmer | rs7685686 |
| | ATCACCAGA | | T*G*T*C*A*T*C*A*mC*m | | XXXXXXXXXX | full PS | (A/G) |
| | | | C*mA*mG*mA | | | | |
| WV-2039 | UAAUAAATTGT | 1945 | mU*mA*mA*mU*mA*A*A | 2297 | XXXXXXXXX | 5-13-2 gapmer | rs7685686 |
| | CATCACCAG | | *T*T*G*T*C*A*T*C*A*C* | | XXXXXXXXXX | full PS | (A/G) |
| | | | C*mA*mG | | | | |
| WV-2040 | UAAUAAATTGT | 1946 | mU*mA*mA*mU*mA*A*A | 2298 | XXXXXXXXX | 5-12-3 gapmer | rs7685686 |
| | CATCACCAG | | *T*T*G*T*C*A*T*C*A*C* | | XXXXXXXXXX | full PS | (A/G) |
| | | | mC*mA*mG | | | | |
| WV-2041 | UAAUAAATTGT | 1947 | mU*mA*mA*mU*mA*A*A | 2299 | XXXXXXXXX | 5-11-4 gapmer | rs7685686 |
| | CATCACCAG | | *T*T*G*T*C*A*T*C*A*m | | XXXXXXXXXX | full PS | (A/G) |
| | | | C*mC*mA*mG | | | | |
| WV-2042 | UAAUAAATTGT | 1948 | mU*mA*mA*mU*mA*A*A | 2300 | XXXXXXXXX | 5-10-5 gapmer | rs7685686 |
| | CATCACCAG | | *T*T*G*T*C*A*T*C*mA* | | XXXXXXXXXX | full PS | (A/G) |
| | | | mC*mC*mA*mG | | | | |
| WV-2043 | UUAAUAAATTG | 1949 | mU*mU*mA*mA*mU*A*A | 2301 | XXXXXXXXX | 5-14-1 gapmer | rs7685686 |
| | TCATCACCA | | *A*T*T*G*T*C*A*T*C*A* | | XXXXXXXXXX | full PS | (A/G) |
| | | | C*C*mA | | | | |
| WV-2044 | UUAAUAAATTG | 1950 | mU*mU*mA*mA*mU*A*A | 2302 | XXXXXXXXX | 5-13-2 gapmer | rs7685686 |
| | TCATCACCA | | *A*T*T*G*T*C*A*T*C*A* | | XXXXXXXXXX | full PS | (A/G) |
| | | | C*mC*mA | | | | |
| WV-2045 | UUAAUAAATTG | 1951 | mU*mU*mA*mA*mU*A*A | 2303 | XXXXXXXXX | 5-12-3 gapmer | rs7685686 |
| | TCATCACCA | | *A*T*T*G*T*C*A*T*C*A* | | XXXXXXXXXX | full PS | (A/G) |
| | | | mC*mC*mA | | | | |
| WV-2046 | UUAAUAAATTG | 1952 | mU*mU*mA*mA*mU*A*A | 2304 | XXXXXXXXX | 5-11-4 gapmer | rs7685686 |
| | TCATCACCA | | *A*T*T*G*T*C*A*T*C*m | | XXXXXXXXXX | full PS | (A/G) |
| | | | A*mC*mC*mA | | | | |
| WV-2047 | AUUAATAAATT | 1953 | mA*mU*mU*mA*mA*T*A* | 2305 | XXXXXXXXX | 5-15 hemimer | rs7685686 |
| | GTCATCACC | | A*A*T*T*G*T*C*A*T*C* | | XXXXXXXXXX | full PS | (A/G) |
| | | | A*C*C | | | | |
| WV-2048 | AUUAATAAATT | 1954 | mA*mU*mU*mA*mA*T*A* | 2306 | XXXXXXXXX | 5-14-1 gapmer | rs7685686 |
| | GTCATCACC | | A*A*T*T*G*T*C*A*T*C* | | XXXXXXXXXX | full PS | (A/G) |
| | | | A*C*mC | | | | |
| WV-2049 | AUUAATAAATT | 1955 | mA*mU*mU*mA*mA*T*A* | 2307 | XXXXXXXXX | 5-13-2 gapmer | rs7685686 |
| | GTCATCACC | | A*A*T*T*G*T*C*A*T*C* | | XXXXXXXXXX | full PS | (A/G) |
| | | | A*mC*mC | | | | |
| WV-2050 | AUUAATAAATT | 1956 | mA*mU*mU*mA*mA*T*A* | 2308 | XXXXXXXXX | 5-12-3 gapmer | rs7685686 |
| | GTCATCACC | | A*A*T*T*G*T*C*A*T*C* | | XXXXXXXXXX | full PS | (A/G) |
| | | | mA*mC*mC | | | | |
| WV-2051 | UAUUAATAAAT | 1957 | mU*mA*mU*mU*mA*A*T* | 2309 | XXXXXXXXX | 5-15 hemimer | rs7685686 |
| | TGTCATCAC | | A*A*A*T*T*G*T*C*A*T* | | XXXXXXXXXX | full PS | (A/G) |
| | | | C*A*C | | | | |
| WV-2052 | UAUUAATAAAT | 1958 | mU*mA*mU*mU*mA*A*T* | 2310 | XXXXXXXXX | 5-14-1 gapmer | rs7685686 |
| | TGTCATCAC | | A*A*A*T*T*G*T*C*A*T* | | XXXXXXXXXX | full PS | (A/G) |
| | | | C*A*mC | | | | |
| WV-2053 | UAUUAATAAAT | 1959 | mU*mA*mU*mU*mA*A*T* | 2311 | XXXXXXXXX | 5-13-2 gapmer | rs7685686 |
| | TGTCATCAC | | A*A*A*T*T*G*T*C*A*T* | | XXXXXXXXXX | full PS | (A/G) |
| | | | C*mA*mC | | | | |
| WV-2054 | CUAUUAATAAA | 1960 | mC*mU*mA*mU*mU*A*A | 2312 | XXXXXXXXX | 5-15 hemimer | rs7685686 |
| | TTGTCATCA | | *T*A*A*A*T*T*G*T*C*A* | | XXXXXXXXXX | full PS | (A/G) |
| | | | T*C*A | | | | |
| WV-2055 | CUAUUAATAAA | 1961 | mC*mU*mA*mU*mU*A*A | 2313 | XXXXXXXXX | 5-14-1 gapmer | rs7685686 |
| | TTGTCATCA | | *T*A*A*A*T*T*G*T*C*A* | | XXXXXXXXXX | full PS | (A/G) |
| | | | T*C*mA | | | | |
| WV-2056 | ACUAUTAATAA | 1962 | mA*mC*mU*mA*mU*T*A* | 2314 | XXXXXXXXX | 5-15 hemimer | rs7685686 |
| | ATTGTCATC | | A*T*A*A*A*T*T*G*T*C* | | XXXXXXXXXX | full PS | (A/G) |
| | | | A*T*C | | | | |
| WV-2057 | TGTCATCACCA | 1963 | T*G*T*C*A*T*C*A*C*C* | 2315 | XXXXXXXXX | 15-5 hemimer 1 | rs7685686 |
| | GAAAAAGUC | | A*G*A*A*A*mAmAmGmU | | XXXXXXOOOX | PS on each end | (A/G) |
| | | | *mC | | | and between dN- | |
| | | | | | | mN and dN-dN | |
| WV-2058 | UTGTCATCACC | 1964 | mU*T*G*T*C*A*T*C*A*C | 2316 | XXXXXXXXX | 1-14-5 gapmer 1 | rs7685686 |
| | AGAAAAAGU | | *C*A*G*A*A*mAmAmAm | | XXXXXXOOOX | PS on each end | (A/G) |
| | | | G*mU | | | and between dN- | |
| | | | | | | mN and dN-dN | |
| WV-2059 | TTGTCATCACC | 1965 | T*T*G*T*C*A*T*C*A*C*C | 2317 | XXXXXXXXX | 15-5 hemimer 1 | rs7685686 |
| | AGAAAAAGU | | *A*G*A*A*mAmAmAmG* | | XXXXXXOOOX | PS on each end | (A/G) |
| | | | mU | | | and between dN- | |
| | | | | | | mN and dN-dN | |
| WV-2060 | AUTGTCATCAC | 1966 | mA*mU*T*G*T*C*A*T*C* | 2318 | XXXXXXXXX | 2-13-5 gapmer 1 | rs7685686 |
| | CAGAAAAAG | | A*C*C*A*G*A*mAmAmA | | XXXXXXOOOX | PS on each end | (A/G) |
| | | | mA*mG | | | and between dN- | |
| | | | | | | mN and dN-dN | |
| WV-2061 | ATTGTCATCAC | 1967 | mA*T*T*G*T*C*A*T*C*A | 2319 | XXXXXXXXX | 1-14-5 gapmer 1 | rs7685686 |
| | CAGAAAAAG | | *C*C*A*G*A*mAmAmAm | | XXXXXXOOOX | PS on each end | (A/G) |
| | | | A*mG | | | and between dN- | |
| | | | | | | mN and dN-dN | |
| WV-2062 | AAUTGTCATCA | 1968 | mA*mAmU*T*G*T*C*A*T | 2320 | XOXXXXXXX | 3-12-5 gapmer 1 | rs7685686 |
| | CCAGAAAAA | | *C*A*C*C*A*G*mAmAmA | | XXXXXXOOOX | PS on each end | (A/G) |
| | | | mA*mA | | | and between dN- | |
| | | | | | | mN and dN-dN | |
| WV-2063 | AATTGTCATCA | 1969 | mA*mA*T*T*G*T*C*A*T* | 2321 | XXXXXXXXX | 2-13-5 gapmer 1 | rs7685686 |
| | CCAGAAAAA | | C*A*C*C*A*G*mAmAmA | | XXXXXXOOOX | PS on each end | (A/G) |
| | | | mA*mA | | | and between dN- | |
| | | | | | | mN and dN-dN | |
| WV-2064 | AAATTGTCATC | 1970 | mA*mAmA*T*T*G*T*C*A | 2322 | XOXXXXXXX | 3-12-5 gapmer 1 | rs7685686 |
| | ACCAGAAAA | | *T*C*A*C*C*A*mGmAmA | | XXXXXXOOOX | PS on each end | (A/G) |
| | | | mA*mA | | | and between dN- | |
| | | | | | | mN and dN-dN | |
| WV-2065 | AAAUTGTCATC | 1971 | mA*mAmAmU*T*G*T*C*A | 2323 | XOOXXXXXX | 4-11-5 gapmer 1 | rs7685686 |
| | ACCAGAAAA | | *T*C*A*C*C*A*mGmAmA | | XXXXXXOOOX | PS on each end | (A/G) |
| | | | mA*mA | | | and between dN- | |
| | | | | | | mN and dN-dN | |
| WV-2066 | UAAAUTGTCAT | 1972 | mU*mAmAmAmU*T*G*T* | 2324 | XOOOXXXXX | 5-11-4 gapmer 1 | rs7685686 |
| | CACCAGAAA | | C*A*T*C*A*C*C*A*mGm | | XXXXXXXOOX | PS on each end | (A/G) |
| | | | AmA*mA | | | and between dN- | |
| | | | | | | mN and dN-dN | |
| WV-2067 | UAAAUTGTCAT | 1973 | mU*mAmAmAmU*T*G*T* | 2325 | XOOOXXXXX | 5-10-5 gapmer 1 | rs7685686 |
| | CACCAGAAA | | C*A*T*C*A*C*C*mAmGm | | XXXXXXOOOX | PS on each end | (A/G) |
| | | | AmA*mA | | | and between dN- | |
| | | | | | | mN and dN-dN | |
| WV-2068 | AUAAATTGTCA | 1974 | mA*mUmAmAmA*T*T*G* | 2326 | XOOOXXXXX | 5-11-4 gapmer 1 | rs7685686 |
| | TCACCAGAA | | T*C*A*T*C*A*C*C*mAm | | XXXXXXXOOX | PS on each end | (A/G) |
| | | | GmA*mA | | | and between dN- | |
| | | | | | | mN and dN-dN | |
| WV-2069 | AUAAATTGTCA | 1975 | mA*mUmAmAmA*T*T*G* | 2327 | XOOOXXXXX | 5-10-5 gapmer 1 | rs7685686 |
| | TCACCAGAA | | T*C*A*T*C*A*C*mCmAm | | XXXXXXOOOX | PS on each end | (A/G) |
| | | | GmA*mA | | | and between dN- | |
| | | | | | | mN and dN-dN | |
| WV-2070 | AAUAAATTGTC | 1976 | mA*mAmUmAmA*A*T*T* | 2328 | XOOOXXXXX | 5-12-3 gapmer 1 | rs7685686 |
| | ATCACCAGA | | G*T*C*A*T*C*A*C*C*mA | | XXXXXXXXOX | PS on each end | (A/G) |
| | | | mG*mA | | | and between dN- | |
| | | | | | | mN and dN-dN | |
| WV-2071 | AAUAAATTGTC | 1977 | mA*mAmUmAmA*A*T*T* | 2329 | XOOOXXXXX | 5-11-4 gapmer 1 | rs7685686 |
| | ATCACCAGA | | G*T*C*A*T*C*A*C*mCm | | XXXXXXXOOX | PS on each end | (A/G) |
| | | | AmG*mA | | | and between dN- | |
| | | | | | | mN and dN-dN | |
| WV-2072 | AAUAAATTGTC | 1978 | mA*mAmUmAmA*A*T*T* | 2330 | XOOOXXXXX | 5-10-5 gapmer 1 | rs7685686 |
| | ATCACCAGA | | G*T*C*A*T*C*A*mCmCm | | XXXXXXOOOX | PS on each end | (A/G) |
| | | | AmG*mA | | | and between dN- | |
| | | | | | | mN and dN-dN | |
| WV-2073 | UAAUAAATTGT | 1979 | mU*mAmAmUmA*A*A*T* | 2331 | XOOOXXXXX | 5-13-2 gapmer 1 | rs7685686 |
| | CATCACCAG | | T*G*T*C*A*T*C*A*C*C* | | XXXXXXXXXX | PS on each end | (A/G) |
| | | | mA*mG | | | and between dN- | |
| | | | | | | mN and dN-dN | |
| WV-2074 | UAAUAAATTGT | 1980 | mU*mAmAmUmA*A*A*T* | 2332 | XOOOXXXXX | 5-12-3 gapmer 1 | rs7685686 |
| | CATCACCAG | | T*G*T*C*A*T*C*A*C*mC | | XXXXXXXXOX | PS on each end | (A/G) |
| | | | mA*mG | | | and between dN- | |
| | | | | | | mN and dN-dN | |
| WV-2075 | UAAUAAATTGT | 1981 | mU*mAmAmUmA*A*A*T* | 2333 | XOOOXXXXX | 5-11-4 gapmer 1 | rs7685686 |
| | CATCACCAG | | T*G*T*C*A*T*C*A*mCmC | | XXXXXXXOOX | PS on each end | (A/G) |
| | | | mA*mG | | | and between dN- | |
| | | | | | | mN and dN-dN | |
| WV-2076 | UAAUAAATTGT | 1982 | mU*mAmAmUmA*A*A*T* | 2334 | XOOOXXXXX | 5-10-5 gapmer 1 | rs7685686 |
| | CATCACCAG | | T*G*T*C*A*T*C*mAmCm | | XXXXXXOOOX | PS on each end | (A/G) |
| | | | CmA*mG | | | and between dN- | |
| | | | | | | mN and dN-dN | |
| WV-2077 | UUAAUAAATTG | 1983 | mU*mUmAmAmU*A*A*A* | 2335 | XOOOXXXXX | 5-14-1 gapmer 1 | rs7685686 |
| | TCATCACCA | | T*T*G*T*C*A*T*C*A*C*C | | XXXXXXXXXX | PS on each end | (A/G) |
| | | | *mA | | | and between dN- | |
| | | | | | | mN and dN-dN | |
| WV-2078 | UUAAUAAATTG | 1984 | mU*mUmAmAmU*A*A*A* | 2336 | XOOOXXXXX | 5-13-2 gapmer 1 | rs7685686 |
| | TCATCACCA | | T*T*G*T*C*A*T*C*A*C* | | XXXXXXXXXX | PS on each end | (A/G) |
| | | | mC*mA | | | and between dN- | |
| | | | | | | mN and dN-dN | |
| WV-2079 | UUAAUAAATTG | 1985 | mU*mUmAmAmU*A*A*A* | 2337 | XOOOXXXXX | 5-12-3 gapmer 1 | rs7685686 |
| | TCATCACCA | | T*T*G*T*C*A*T*C*A*mC | | XXXXXXXXOX | PS on each end | (A/G) |
| | | | mC*mA | | | and between dN- | |
| | | | | | | mN and dN-dN | |
| WV-2080 | UUAAUAAATTG | 1986 | mU*mUmAmAmU*A*A*A* | 2338 | XOOOXXXXX | 5-11-4 gapmer 1 | rs7685686 |
| | TCATCACCA | | T*T*G*T*C*A*T*C*mAmC | | XXXXXXXOOX | PS on each end | (A/G) |
| | | | mC*mA | | | and between dN- | |
| | | | | | | mN and dN-dN | |
| WV-2081 | AUUAATAAATT | 1987 | mA*mUmUmAmA*T*A*A* | 2339 | XOOOXXXXX | 5-15 hemimer 1 | rs7685686 |
| | GTCATCACC | | A*T*T*G*T*C*A*T*C*A*C | | XXXXXXXXXX | PS on each end | (A/G) |
| | | | *C | | | and between dN- | |
| | | | | | | mN and dN-dN | |
| WV-2082 | AUUAATAAATT | 1988 | mA*mUmUmAmA*T*A*A* | 2340 | XOOOXXXXX | 5-14-1 gapmer 1 | rs7685686 |
| | GTCATCACC | | A*T*T*G*T*C*A*T*C*A*C | | XXXXXXXXXX | PS on each end | (A/G) |
| | | | *mC | | | and between dN- | |
| | | | | | | mN and dN-dN | |
| WV-2083 | AUUAATAAATT | 1989 | mA*mUmUmAmA*T*A*A* | 2341 | XOOOXXXXX | 5-13-2 gapmer 1 | rs7685686 |
| | GTCATCACC | | A*T*T*G*T*C*A*T*C*A* | | XXXXXXXXXX | PS on each end | (A/G) |
| | | | mC*mC | | | and between dN- | |
| | | | | | | mN and dN-dN | |
| WV-2084 | AUUAATAAATT | 1990 | mA*mUmUmAmA*T*A*A* | 2342 | XOOOXXXXX | 5-12-3 gapmer 1 | rs7685686 |
| | GTCATCACC | | A*T*T*G*T*C*A*T*C*mA | | XXXXXXXXOX | PS on each end | (A/G) |
| | | | mC*mC | | | and between dN- | |
| | | | | | | mN and dN-dN | |
| WV-2085 | UAUUAATAAAT | 1991 | mU*mAmUmUmA*A*T*A* | 2343 | XOOOXXXXX | 5-15 hemimer 1 | rs7685686 |
| | TGTCATCAC | | A*A*T*T*G*T*C*A*T*C* | | XXXXXXXXXX | PS on each end | (A/G) |
| | | | A*C | | | and between dN- | |
| | | | | | | mN and dN-dN | |
| WV-2086 | UAUUAATAAAT | 1992 | mU*mAmUmUmA*A*T*A* | 2344 | XOOOXXXXX | 5-14-1 gapmer 1 | rs7685686 |
| | TGTCATCAC | | A*A*T*T*G*T*C*A*T*C* | | XXXXXXXXXX | PS on each end | (A/G) |
| | | | A*mC | | | and between dN- | |
| | | | | | | mN and dN-dN | |
| WV-2087 | UAUUAATAAAT | 1993 | mU*mAmUmUmA*A*T*A* | 2345 | XOOOXXXXX | 5-13-2 gapmer 1 | rs7685686 |
| | TGTCATCAC | | A*A*T*T*G*T*C*A*T*C* | | XXXXXXXXXX | PS on each end | (A/G) |
| | | | mA*mC | | | and between dN- | |
| | | | | | | mN and dN-dN | |
| WV-2088 | CUAUUAATAAA | 1994 | mC*mUmAmUmU*A*A*T* | 2346 | XOOOXXXXX | 5-15 hemimer 1 | rs7685686 |
| | TTGTCATCA | | A*A*A*T*T*G*T*C*A*T* | | XXXXXXXXXX | PS on each end | (A/G) |
| | | | C*A | | | and between dN- | |
| | | | | | | mN and dN-dN | |
| WV-2089 | CUAUUAATAAA | 1995 | mC*mUmAmUmU*A*A*T* | 2347 | XOOOXXXXX | 5-14-1 gapmer 1 | rs7685686 |
| | TTGTCATCA | | A*A*A*T*T*G*T*C*A*T* | | XXXXXXXXXX | PS on each end | (A/G) |
| | | | C*mA | | | and between dN- | |
| | | | | | | mN and dN-dN | |
| WV-2090 | ACUAUTAATAA | 1996 | mA*mCmUmAmU*T*A*A* | 2348 | XOOOXXXXX | 5-15 hemimer 1 | rs7685686 |
| | ATTGTCATC | | T*A*A*A*T*T*G*T*C*A*T | | XXXXXXXXXX | PS on each end | (A/G) |
| | | | *C | | | and between dN- | |
| | | | | | | mN and dN-dN | |
| WV-2163 | GACUUUUUCU | 1997 | rGrArCrUrUrUrUrUrCrUrGr | 2349 | OOOOOOOOO | HTT rs7685686 | HTT rs7685686 |
| | GGUGAUGGCA | | GrUrGrArUrGrGrCrArArUrU | | OOOOOOOOO | | |
| | AUUUAUUAAU | | rUrArUrUrArArUrArG | | OOOOOOOOO | | |
| | AG | | | | OOOO | | |
| WV-2164 | GACUUUUUCU | 1998 | rGrArCrUrUrUrUrUrCrUrGr | 2350 | OOOOOOOOO | HTT rs7685686 | HTT rs7685686 |
| | GGUGAUGACA | | GrUrGrArUrGrArCrArArUrU | | OOOOOOOOO | | |
| | AUUUAUUAAU | | rUrArUrUrArArUrArG | | OOOOOOOOO | | |
| | AG | | | | OOOO | | |
| WV-2269 | UAAAUTGTCAT | 1999 | mU*SmAmAmAmU*ST*SG | 2351 | SOOOSSSSSRS | 5-10-5 2′ OMe- | HTT rs7685686 |
| | CACCAGAAA | | *ST*SC*SA*RT*SC*SA*SC | | SSSSOOOS | DNA-2′-OMe | |
| | | | *SC*SmAmGmAmA*SmA | | | Gapmer 1-3-11- | |
| | | | | | | 3-1 (PS/PO) | |
| WV-2270 | AUAAATTGTCA | 2000 | mA*SmUmAmAmA*ST*ST | 2352 | SOOOSSSSSSR | 5-10-5 2′ OMe- | HTT rs7685686 |
| | TCACCAGAA | | *SG*ST*SC*SA*RT*SC*SA | | SSSSOOOS | DNA-2′-OMe | |
| | | | *SC*SmCmAmGmA*SmA | | | Gapmer 1-3-11- | |
| | | | | | | 3-1 (PS/PO) | |
| WV-2271 | AAUAAATTGTC | 2001 | mA*SmAmUmAmA*SA*ST | 2353 | SOOOSSSSSSS | 5-10-5 2′ OMe- | HTT rs7685686 |
| | ATCACCAGA | | *ST*SG*ST*SC*SA*RT*SC | | RSSSOOOS | DNA-2′-OMe | |
| | | | *SA*SmCmCmAmG*SmA | | | Gapmer 1-3-11- | |
| | | | | | | 3-1 (PS/PO) | |
| WV-2272 | UAAUAAATTGT | 2002 | mU*SmAmAmUmA*SA*SA | 2354 | SOOOSSSSSSS | 5-10-5 2′ OMe- | HTT rs7685686 |
| | CATCACCAG | | *ST*ST*SG*ST*SC*SA*RT | | SRSSOOOS | DNA-2′-OMe | |
| | | | *SC*SmAmCmCmA*SmG | | | Gapmer 1-3-11- | |
| | | | | | | 3-1 (PS/PO) | |
| WV-2374 | AAUAAATTGTC | 2003 | mA*SmAmUmAmA*SA*ST | 2355 | SOOOSSSSSSS | P10 stereopure | HTT rs7685686 |
| | ATCACCAGA | | *ST*SG*ST*SC*SA*RT*SC | | RSSSSOOS | analogue of WV- | |
| | | | *SA*SC*SmCmAmG*SmA | | | 2071 5-11-4 2′- | |
| | | | | | | OMe-DNA-2′- | |
| | | | | | | OMe Gapmer 1- | |
| | | | | | | 3-12-2-1 | |
| | | | | | | (PS/PO) | |
| WV-2375 | UAAUAAATTGT | 2004 | mU*SmAmAmUmA*SA*SA | 2356 | SOOOSSSSSSS | P11 stereopure | HTT rs7685686 |
| | CATCACCAG | | *ST*ST*SG*ST*SC*SA*RT | | SRSSSOOS | analogue of WV- | |
| | | | *SC*SA*SmCmCmA*SmG | | | 20755-11-4 2′- | |
| | | | | | | OMe-DNA-2′- | |
| | | | | | | OMe Gapmer 1- | |
| | | | | | | 3-12-2-1 | |
| | | | | | | (PS/PO) | |
| WV-2377 | GCACAAGGGCA | 2005 | mG*mCmAmCmA*A*G*G* | 2357 | XOOOXXXXX | P11 | HTT rs362307 |
| | CAGACUUCC | | G*C*A*C*A*G*A*mCmUm | | XXXXXXOOOX | stereorandom | |
| | | | UmC*mC | | | analogue of WV- | |
| | | | | | | 932 5-10-5 2′- | |
| | | | | | | OMe-DNA-2′- | |
| | | | | | | OMe Gapmer | |
| | | | | | | and 1-3-11-3-1 | |
| | | | | | | (PS/PO) | |
| WV-2378 | GCACAAGGGCA | 2006 | mG*SmCmAmCmA*SA*SG | 2358 | SOOOSSSSSSS | P11 | HTT rs362307 |
| | CAGACUUCC | | *SG*SG*SC*SA*SC*RA*S | | RSSSOOOS | stereorandom | |
| | | | G*SA*SmCmUmUmC*SmC | | | analogue of WV- | |
| | | | | | | 932 5-10-5 2′- | |
| | | | | | | OMe-DNA-2′- | |
| | | | | | | OMe Gapmer | |
| | | | | | | and 1-3-11-3-1 | |
| | | | | | | (PS/PO) | |
| WV-2379 | CACAAGGGCAC | 2007 | mC*mAmCmAmA*G*G*G* | 2359 | XOOOXXXXX | P10 | HTT rs362307 |
| | AGACUUCCA | | C*A*C*A*G*A*C*mUmUm | | XXXXXXOOOX | sereorandom | |
| | | | CmC*mA | | | analogue of WV- | |
| | | | | | | 933 5-10-5 2′- | |
| | | | | | | OMe-DNA-2′- | |
| | | | | | | OMe Gapmer | |
| | | | | | | and 1-3-11-3-1 | |
| | | | | | | (PS/PO) | |
| WV-2380 | CACAAGGGCAC | 2008 | mC*SmAmCmAmA*SG*SG | 2360 | SOOOSSSSSSR | P10 stereopure | HTT rs362307 |
| | AGACUUCCA | | *SG*SC*SA*SC*RA*SG*S | | SSSSOOOS | analogue of WV- | |
| | | | A*SC*SmUmUmCmC*SmA | | | 933 5-10-5 2′- | |
| | | | | | | OMe-DNA-2′- | |
| | | | | | | OMe Gapmer | |
| | | | | | | and 1-3-11-3-1 | |
| | | | | | | (PS/PO) | |
| WV-2416 | UAAAUTGTCAT | 2009 | mU*SmAmAmAmU*ST*SG | 2361 | SOOOSSSSRSS | P8 5-10-5 2′ | HTT rs7685686 |
| | CACCAGAAA | | *ST*SC*RA*ST*SC*SA*SC | | SSSSOOOS | OMe-DNA-2′- | |
| | | | *SC*SmAmGmAmA*SmA | | | OMe Gapmer 1- | |
| | | | | | | 3-11-3-1 | |
| | | | | | | (PS/PO) | |
| WV-2417 | AUAAATTGTCA | 2010 | mA*SmUmAmAmA*ST*ST | 2362 | SOOOSSSSSRS | P9 5-10-5 2′ | HTT rs7685686 |
| | TCACCAGAA | | *SG*ST*SC*RA*ST*SC*SA | | SSSSOOOS | OMe-DNA-2′- | |
| | | | *SC*SmCmAmGmA*SmA | | | OMe Gapmer 1- | |
| | | | | | | 3-11-3-1 | |
| | | | | | | (PS/PO) | |
| WV-2418 | AAUAAATTGTC | 2011 | mA*SmAmUmAmA*SA*ST | 2363 | SOOOSSSSSSR | P10 5-10-5 2′ | HTT rs7685686 |
| | ATCACCAGA | | *ST*SG*ST*SC*RA*ST*SC | | SSSSOOOS | OMe-DNA-2′- | |
| | | | *SA*SmCmCmAmG*SmA | | | OMe Gapmer 1- | |
| | | | | | | 3-11-3-1 | |
| | | | | | | (PS/PO) | |
| WV-2419 | UAAUAAATTGT | 2012 | mU*SmAmAmUmA*SA*SA | 2364 | SOOOSSSSSSS | P11 5-10-5 2′ | HTT rs7685686 |
| | CATCACCAG | | *ST*ST*SG*ST*SC*RA*ST | | RSSSOOOS | OMe-DNA-2′- | |
| | | | *SC*SmAmCmCmA*SmG | | | OMe Gapmer 1- | |
| | | | | | | 3-11-3-1 | |
| | | | | | | (PS/PO) | |
| WV-2589 | UCCCCACAGAG | 2013 | mU*SmCmCmCmC*SA*SC | 2365 | SOOOSSRSSSS | P6 5-10-5 (2′- | HTT rs2530595 |
| | GGAGGAAGC | | *RA*SG*SA*SG*SG*SG*S | | SSSSOOOS | OMe-DNA-2′- | (C/T) |
| | | | A*SG*SmGmAmAmG*SmC | | | OMe) 1-3-11-3- | |
| | | | | | | 1 (PS/PO) | |
| | | | | | | Gapmer | |
| WV-2590 | CUCCCCACAGA | 2014 | mC*SmUmCmCmC*SC*SA | 2366 | SOOOSSSRSSS | P7 5-10-5 (2′- | HTT |
| | GGGAGGAAG | | *SC*RA*SG*SA*SG*SG*S | | SSSSOOOS | OMe-DNA-2′- | rs2530595 |
| | | | G*SA*SmGmGmAmA*SmG | | | OMe) 1-3-11-3- | (C/T) |
| | | | | | | 1 (PS/PO) | |
| | | | | | | Gapmer | |
| WV-2591 | CCUCCCCACAG | 2015 | mC*SmCmUmCmC*SC*SC* | 2367 | SOOOSSSSRSS | P8 5-10-5 (2′- | HTT |
| | AGGGAGGAA | | SA*SC*RA*SG*SA*SG*SG | | SSSSOOOS | OMe-DNA-2′- | rs2530595 |
| | | | *SG*SmAmGmGmA*SmA | | | OMe) 1-3-11-3- | (C/T) |
| | | | | | | 1 (PS/PO) | |
| | | | | | | Gapmer | |
| WV-2592 | UCCUCCCCACA | 2016 | mU*SmCmCmUmC*SC*SC | 2368 | SOOOSSSSSRS | P9 5-10-5 (2′- | HTT |
| | GAGGGAGGA | | *SC*SA*SC*RA*SG*SA*S | | SSSSOOOS | OMe-DNA-2′- | rs2530595 |
| | | | G*SG*SmGmAmGmG*SmA | | | OMe) 1-3-11-3- | (C/T) |
| | | | | | | 1 (PS/PO) | |
| | | | | | | Gapmer | |
| WV-2593 | GUCCUCCCCAC | 2017 | mG*SmUmCmCmU*SC*SC | 2369 | SOOOSSSSSSR | P10 5-10-5 (2′- | HTT |
| | AGAGGGAGG | | *SC*SC*SA*SC*RA*SG*S | | SSSSOOOS | OMe-DNA-2′- | rs2530595 |
| | | | A*SG*SmGmGmAmG*SmG | | | OMe) 1-3-11-3- | (C/T) |
| | | | | | | 1 (PS/PO) | |
| | | | | | | Gapmer | |
| WV-2594 | GGUCCTCCCCA | 2018 | mG*SmGmUmCmC*ST*SC | 2370 | SOOOSSSSSSS | P11 5-10-5 (2′- | HTT |
| | CAGAGGGAG | | *SC*SC*SC*SA*SC*RA*S | | RSSSOOOS | OMe-DNA-2′- | rs2530595 |
| | | | G*SA*SmGmGmGmA*SmG | | | OMe) 1-3-11-3- | (C/T) |
| | | | | | | 1 (PS/PO) | |
| | | | | | | Gapmer | |
| WV-2595 | GGGUCCTCCCC | 2019 | mG*SmGmGmUmC*SC*ST | 2371 | SOOOSSSSSSS | P12 5-10-5 (2′- | HTT |
| | ACAGAGGGA | | *SC*SC*SC*SC*SA*SC*RA | | SRSSOOOS | OMe-DNA-2′- | rs2530595 |
| | | | *SG*SmAmGmGmG*SmA | | | OMe) 1-3-11-3- | (C/T) |
| | | | | | | 1 (PS/PO) | |
| | | | | | | Gapmer | |
| WV-2596 | CGGGUCCTCCC | 2020 | mC*SmGmGmGmU*SC*SC | 2372 | SOOOSSSSSSS | P13 5-10-5 (2′- | HTT |
| | CACAGAGGG | | *ST*SC*SC*SC*SC*SA*SC | | SSRSOOOS | OMe-DNA-2′- | rs2530595 |
| | | | *RA*SmGmAmGmG*SmG | | | OMe) 1-3-11-3- | (C/T) |
| | | | | | | 1 (PS/PO) | |
| | | | | | | Gapmer | |
| WV-2597 | ACAGUAGATGA | 2021 | mA*SmCmAmGmU*SA*SG | 2373 | SOOOSSRSSSS | P6 5-10-5 (2′- | HTT |
| | GGGAGCAGG | | *RA*ST*SG*SA*SG*SG*S | | SSSSOOOS | OMe-DNA-2′- | (rs362331) |
| | | | G*SA*SmGmCmAmG*SmG | | | OMe) 1-3-11-3- | (C/T) |
| | | | | | | 1 (PS/PO) | |
| | | | | | | Gapmer | |
| WV-2598 | CACAGTAGATG | 2022 | mC*SmAmCmAmG*ST*SA | 2374 | SOOOSSSRSSS | P7 5-10-5 (2′- | HTT |
| | AGGGAGCAG | | *SG*RA*ST*SG*SA*SG*S | | SSSSOOOS | OMe-DNA-2′- | (rs362331) |
| | | | G*SG*SmAmGmCmA*SmG | | | OMe) 1-3-11-3- | (C/T) |
| | | | | | | 1 (PS/PO) | |
| | | | | | | Gapmer | |
| WV-2599 | ACACAGTAGAT | 2023 | mA*SmCmAmCmA*SG*ST | 2375 | SOOOSSSSRSS | P8 5-10-5 (2′- | HTT |
| | GAGGGAGCA | | *SA*SG*RA*ST*SG*SA*S | | SSSSOOOS | OMe-DNA-2′- | (rs362331) |
| | | | G*SG*SmGmAmGmC*SmA | | | OMe) 1-3-11-3- | (C/T) |
| | | | | | | 1 (PS/PO) | |
| | | | | | | Gapmer | |
| WV-2600 | CACACAGTAGA | 2024 | mC*SmAmCmAmC*SA*SG | 2376 | SOOOSSSSSRS | P9 5-10-5 (2′- | HTT |
| | TGAGGGAGC | | *ST*SA*SG*RA*ST*SG*S | | SSSSOOOS | OMe-DNA-2′- | (rs362331) |
| | | | A*SG*SmGmGmAmG*SmC | | | OMe) 1-3-11-3- | (C/T) |
| | | | | | | 1 (PS/PO) | |
| | | | | | | Gapmer | |
| WV-2601 | GCACACAGTAG | 2025 | mG*SmCmAmCmA*SC*SA | 2377 | SOOOSSSSSSR | P10 5-10-5 (2′- | HTT |
| | ATGAGGGAG | | *SG*ST*SA*SG*RA*ST*S | | SSSSOOOS | OMe-DNA-2′- | (rs362331) |
| | | | G*SA*SmGmGmGmA*SmG | | | OMe) 1-3-11-3- | (C/T) |
| | | | | | | 1 (PS/PO) | |
| | | | | | | Gapmer | |
| WV-2602 | UGCACACAGTA | 2026 | mU*SmGmCmAmC*SA*SC | 2378 | SOOOSSSSSSS | P11 5-10-5 (2′- | HTT |
| | GATGAGGGA | | *SA*SG*ST*SA*SG*RA*S | | RSSSOOOS | OMe-DNA-2′- | (rs362331) |
| | | | T*SG*SmAmGmGmG*SmA | | | OMe) 1-3-11-3- | (C/T) |
| | | | | | | 1 (PS/PO) | |
| | | | | | | Gapmer | |
| WV-2603 | GUGCACACAGT | 2027 | mG*SmUmGmCmA*SC*SA | 2379 | SOOOSSSSSSS | P12 5-10-5 (2′- | HTT |
| | AGATGAGGG | | *SC*SA*SG*ST*SA*SG*R | | SRSSOOOS | OMe-DNA-2′- | (rs362331) |
| | | | A*ST*SmGmAmGmG*SmG | | | OMe) 1-3-11-3- | (C/T) |
| | | | | | | 1 (PS/PO) | |
| | | | | | | Gapmer | |
| WV-2604 | AGUGCACACAG | 2028 | mA*SmGmUmGmC*SA*SC | 2380 | SOOOSSSSSSS | P13 5-10-5 (2′- | HTT |
| | TAGAUGAGG | | *SA*SC*SA*SG*ST*SA*SG | | SSRSOOOS | OMe-DNA-2′- | (rs362331) |
| | | | *RA*SmUmGmAmG*SmG | | | OMe) 1-3-11-3- | (C/T) |
| | | | | | | 1 (PS/PO) | |
| | | | | | | Gapmer | |
| WV-2605 | UCCCCACAGAG | 2029 | mU*mCmCmCmC*A*C*A* | 2381 | XOOOXXXXX | P6 5-10-5 (2′- | HTT r2530595 |
| | GGAGGAAGC | | G*A*G*G*G*A*G*mGmAm | | XXXXXXOOOX | OMe-DNA-2′- | (C/T) |
| | | | AmG*mC | | | OMe) 1-3-11-3- | |
| | | | | | | 1 (P/PO) Gapmer | |
| WV-2606 | CUCCCCACAGA | 2030 | mC*mUmCmCmC*C*A*C* | 2382 | XOOOXXXXX | P7 5-10-5 (2′- | HTT r2530595 |
| | GGGAGGAAG | | A*G*A*G*G*G*A*mGmGm | | XXXXXXOOOX | OMe-DNA-2′- | (C/T) |
| | | | AmA*mG | | | OMe) 1-3-11-3- | |
| | | | | | | 1 (P/PO) Gapmer | |
| WV-2607 | CCUCCCCACAG | 2031 | mC*mCmUmCmC*C*C*A* | 2383 | XOOOXXXXX | P8 5-10-5 (2′- | HTT r2530595 |
| | AGGGAGGAA | | C*A*G*A*G*G*G*mAmGm | | XXXXXXOOOX | OMe-DNA-2′- | (C/T) |
| | | | GmA*mA | | | OMe) 1-3-11-3- | |
| | | | | | | 1 (P/PO) Gapmer | |
| WV-2608 | UCCUCCCCACA | 2032 | mU*mCmCmUmC*C*C*C* | 2384 | XOOOXXXXX | P9 5-10-5 (2′- | HTT r2530595 |
| | GAGGGAGGA | | A*C*A*G*A*G*G*mGmAm | | XXXXXXOOOX | OMe-DNA-2′- | (C/T) |
| | | | GmG*mA | | | OMe) 1-3-11-3- | |
| | | | | | | 1 (P/PO) Gapmer | |
| WV-2609 | GUCCUCCCCAC | 2033 | mG*mUmCmCmU*C*C*C* | 2385 | XOOOXXXXX | P10 5-10-5 (2′- | HTT r2530595 |
| | AGAGGGAGG | | C*A*C*A*G*A*G*mGmGm | | XXXXXXOOOX | OMe-DNA-2′- | (C/T) |
| | | | AmG*mG | | | OMe) 1-3-11-3- | |
| | | | | | | 1 (P/PO) Gapmer | |
| WV-2610 | GGUCCTCCCCA | 2034 | mG*mGmUmCmC*T*C*C* | 2386 | XOOOXXXXX | P11 5-10-5 (2′- | HTT r2530595 |
| | CAGAGGGAG | | C*C*A*C*A*G*A*mGmGm | | XXXXXXOOOX | OMe-DNA-2′- | (C/T) |
| | | | GmA*mG | | | OMe) 1-3-11-3- | |
| | | | | | | 1 (P/PO) Gapmer | |
| WV-2611 | GGGUCCTCCCC | 2035 | mG*mGmGmUmC*C*T*C* | 2387 | XOOOXXXXX | P12 5-10-5 (2′- | HTT r2530595 |
| | ACAGAGGGA | | C*C*C*A*C*A*G*mAmGm | | XXXXXXOOOX | OMe-DNA-2′- | (C/T) |
| | | | GmG*mA | | | OMe) 1-3-11-3- | |
| | | | | | | 1 (P/PO) Gapmer | |
| WV-2612 | CGGGUCCTCCC | 2036 | mC*mGmGmGmU*C*C*T* | 2388 | XOOOXXXXX | P13 5-10-5 (2′- | HTT r2530595 |
| | CACAGAGGG | | C*C*C*C*A*C*A*mGmAm | | XXXXXXOOOX | OMe-DNA-2′- | (C/T) |
| | | | GmG*mG | | | OMe) 1-3-11-3- | |
| | | | | | | 1 (P/PO) Gapmer | |
| WV-2613 | ACAGUAGATGA | 2037 | mA*mCmAmGmU*A*G*A* | 2389 | XOOOXXXXX | P6 5-10-5 (2′- | HTT (r362331) |
| | GGGAGCAGG | | T*G*A*G*G*G*A*mGmCm | | XXXXXXOOOX | OMe-DNA-2′- | (C/T) |
| | | | AmG*mG | | | OMe) 1-3-11-3- | |
| | | | | | | 1 (P/PO) Gapmer | |
| WV-2614 | CACAGTAGATG | 2038 | mC*mAmCmAmG*T*A*G* | 2390 | XOOOXXXXX | P7 5-10-5 (2′- | HTT (r362331) |
| | AGGGAGCAG | | A*T*G*A*G*G*G*mAmGm | | XXXXXXOOOX | OMe-DNA-2′- | (C/T) |
| | | | CmA*mG | | | OMe) 1-3-11-3- | |
| | | | | | | 1 (P/PO) Gapmer | |
| WV-2615 | ACACAGTAGAT | 2039 | mA*mCmAmCmA*G*T*A* | 2391 | XOOOXXXXX | P8 5-10-5 (2′- | HTT (r362331) |
| | GAGGGAGCA | | G*A*T*G*A*G*G*mGmAm | | XXXXXXOOOX | OMe-DNA-2′- | (C/T) |
| | | | GmC*mA | | | OMe) 1-3-11-3- | |
| | | | | | | 1 (P/PO) Gapmer | |
| WV-2616 | CACACAGTAGA | 2040 | mC*mAmCmAmC*A*G*T* | 2392 | XOOOXXXXX | P9 5-10-5 (2′- | HTT (r362331) |
| | TGAGGGAGC | | A*G*A*T*G*A*G*mGmGm | | XXXXXXOOOX | OMe-DNA-2′- | (C/T) |
| | | | AmG*mC | | | OMe) 1-3-11-3- | |
| | | | | | | 1 (P/PO) Gapmer | |
| WV-2617 | GCACACAGTAG | 2041 | mG*mCmAmCmA*C*A*G* | 2393 | XOOOXXXXX | P10 5-10-5 (2′- | HTT (r362331) |
| | ATGAGGGAG | | T*A*G*A*T*G*A*mGmGm | | XXXXXXOOOX | OMe-DNA-2′- | (C/T) |
| | | | GmA*mG | | | OMe) 1-3-11-3- | |
| | | | | | | 1 (P/PO) Gapmer | |
| WV-2618 | UGCACACAGTA | 2042 | mU*mGmCmAmC*A*C*A* | 2394 | XOOOXXXXX | P11 5-10-5 (2′- | HTT (r362331) |
| | GATGAGGGA | | G*T*A*G*A*T*G*mAmGm | | XXXXXXOOOX | OMe-DNA-2′- | (C/T) |
| | | | GmG*mA | | | OMe) 1-3-11-3- | |
| | | | | | | 1 (P/PO) Gapmer | |
| WV-2619 | GUGCACACAGT | 2043 | mG*mUmGmCmA*C*A*C* | 2395 | X000XXXXX | P12 5-10-5 (2′- | HTT (r362331) |
| | AGATGAGGG | | A*G*T*A*G*A*T*mGmAm | | XXXXXXOOOX | OMe-DNA-2′- | (C/T) |
| | | | GmG*mG | | | OMe) 1-3-11-3- | |
| | | | | | | 1 (P/PO) Gapmer | |
| WV-2620 | AGUGCACACAG | 2044 | mA*mGmUmGmC*A*C*A* | 2396 | XOOOXXXXX | P13 5-10-5 (2′- | HTT (r362331) |
| | TAGAUGAGG | | C*A*G*T*A*G*A*mUmGm | | XXXXXXOOOX | OMe-DNA-2′- | (C/T) |
| | | | AmG*mG | | | OMe) 1-3-11-3- | |
| | | | | | | 1 (P/PO) Gapmer | |
| WV-2623 | GGCACAAGGGC | 2045 | GGCACAAGGGCACAGAC | 2397 | OOOOOOOOO | DNA version of | HTT rs362307 |
| | ACAGACTTC | | TTC | | OOOOOOOOOO | WV-1092 | (C/T) |
| WV-2659 | GGCACAAGGGC | 2046 | mG*SmGmCmAmC*SA*SA | 2398 | SOOOSSSSSSS | WV-1092 | rs362307 |
| | ACAGACUUC | | *SG*SG*SG*SC*SA*SC*S | | SSSSOOOS | analogue with | Human HTT |
| | | | A*SG*SmAmCmUmU*SmC | | | All Sp | |
| | | | | | | stereochemistry | |
| WV-2671 | GGGUCCTCCCC | 2047 | mG*SmG*SmGmUmC*SC* | 2399 | SSOOSSSSSSSS | P12 5-10-5 (2′- | HTT |
| | ACAGAGGGA | | ST*SC*SC*SC*SC*SA*SC* | | RSSOOSS | OMe-DNA-2′- | rs2530595 |
| | | | RA*SG*SmAmGmG*SmG* | | | OMe) 2-2-11-2- | (C/T) |
| | | | SmA | | | 2 (PS/PO) | |
| | | | | | | Gapmer with Sp | |
| | | | | | | wings | |
| WV-2672 | GGGUCCTCCCC | 2048 | mG*RmG*RmGmUmC*SC* | 2400 | RROOSSSSSSS | P12 5-10-5 (2′- | HTT |
| | ACAGAGGGA | | ST*SC*SC*SC*SC*SA*SC* | | SRSSOORR | OMe-DNA-2′- | rs2530595 |
| | | | RA*SG*SmAmGmG*RmG* | | | OMe) 4-11-4 | (C/T) |
| | | | RmA | | | (PS/PO) Gapmer | |
| | | | | | | with Rp wings | |
| WV-2673 | GGGUCCTCCCC | 2049 | mG*SmG*SmG*SmU*SmC* | 2401 | SSSSSSSSSSSS | P12 5-10-5 (2′- | HTT |
| | ACAGAGGGA | | SC*ST*SC*SC*SC*SC*SA* | | RSSSSSS | OMe-DNA-2′- | rs2530595 |
| | | | SC*RA*SG*SmA*SmG*Sm | | | OMe) 2-2-11-2- | (C/T) |
| | | | G*SmG*SmA | | | 2 (PS/PO) | |
| | | | | | | Gapmer with Sp | |
| | | | | | | wings | |
| WV-2674 | GGGUCCTCCCC | 2050 | mG*RmG*RmG*RmU*RmC | 2402 | RRRRSSSSSSS | P12 5-10-5 (2′- | HTT |
| | ACAGAGGGA | | *SC*ST*SC*SC*SC*SC*SA | | SRSSRRRR | OMe-DNA-2′- | rs2530595 |
| | | | *SC*RA*SG*SmA*RmG*R | | | OMe) 2-2-11-2- | (C/T) |
| | | | mG*RmG*RmA | | | 2 (PS/PO) | |
| | | | | | | Gapmer with Rp | |
| | | | | | | wings | |
| WV-2675 | GGGUUCTCCCC | 2051 | mG*SmGmGmUmU*SC*ST | 2403 | SOOOSSSSSSS | P12 analogue of | HTT |
| | ACAGAGGGA | | *SC*SC*SC*SC*SA*SC*RA | | SRSSOOOS | WV-2595 with | rs2530595 |
| | | | *SG*SmAmGmGmG*SmA | | | G:U mismatch at | (C/T) |
| | | | | | | position 5 | |
| WV-2676 | GGCACAAGGGC | 2052 | mG*RmGmCmAmC*SA*SA | 2404 | ROOOSSSSSSS | WV-1092 | rs362307 |
| | ACAGACUUC | | *SG*SG*SG*SC*SA*SC*S | | SSSSOOOS | analogue for | Human HTT |
| | | | A*SG*SmAmCmUmU*SmC | | | CMC | |
| WV-2682 | GGCACAAGGGC | 2053 | mG*SmGmCmAmC*RA*SA | 2405 | SOOORSSSSSS | WV-1092 | rs362307 |
| | ACAGACUUC | | *SG*SG*SG*SC*SA*SC*S | | SSSSOOOS | analogue for | Human HTT |
| | | | A*SG*SmAmCmUmU*SmC | | | CMC | |
| WV-2683 | GGCACAAGGGC | 2054 | mG*SmGmCmAmC*SA*RA | 2406 | SOOOSRSSSSS | WV-1092 | rs362307 |
| | ACAGACUUC | | *SG*SG*SG*SC*SA*SC*S | | SSSSOOOS | analogue for | Human HTT |
| | | | A*SG*SmAmCmUmU*SmC | | | CMC | |
| WV-2684 | GGCACAAGGGC | 2055 | mG*SmGmCmAmC*SA*SA | 2407 | SOOOSSRSSSS | WV-1092 | rs362307 |
| | ACAGACUUC | | *RG*SG*SG*SC*SA*SC*S | | SSSSOOOS | analogue for | Human HTT |
| | | | A*SG*SmAmCmUmU*SmC | | | CMC | |
| WV-2685 | GGCACAAGGGC | 2056 | mG*SmGmCmAmC*SA*SA | 2408 | SOOOSSSRSSS | WV-1092 | rs362307 |
| | ACAGACUUC | | *SG*RG*SG*SC*SA*SC*S | | SSSSOOOS | analogue for | Human HTT |
| | | | A*SG*SmAmCmUmU*SmC | | | CMC | |
| WV-2686 | GGCACAAGGGC | 2057 | mG*SmGmCmAmC*SA*SA | 2409 | SOOOSSSSRSS | WV-1092 | rs362307 |
| | ACAGACUUC | | *SG*SG*RG*SC*SA*SC*S | | SSSSOOOS | analogue for | Human HTT |
| | | | A*SG*SmAmCmUmU*SmC | | | CMC | |
| WV-2687 | GGCACAAGGGC | 2058 | mG*SmGmCmAmC*SA*SA | 2410 | SOOOSSSSSRS | WV-1092 | rs362307 |
| | ACAGACUUC | | *SG*SG*SG*RC*SA*SC*S | | SSSSOOOS | analogue for | Human HTT |
| | | | A*SG*SmAmCmUmU*SmC | | | CMC | |
| WV-2688 | GGCACAAGGGC | 2059 | mG*SmGmCmAmC*SA*SA | 2411 | SOOOSSSSSSR | WV-1092 | rs362307 |
| | ACAGACUUC | | *SG*SG*SG*SC*RA*SC*S | | SSSSOOOS | analogue for | Human HTT |
| | | | A*SG*SmAmCmUmU*SmC | | | CMC | |
| WV-2689 | GGCACAAGGGC | 2060 | mG*SmGmCmAmC*SA*SA | 2412 | SOOOSSSSSSS | WV-1092 | rs362307 |
| | ACAGACUUC | | *SG*SG*SG*SC*SA*RC*S | | RSSSOOOS | analogue for | Human HTT |
| | | | A*SG*SmAmCmUmU*SmC | | | CMC | |
| WV-2690 | GGCACAAGGGC | 2061 | mG*SmGmCmAmC*SA*SA | 2413 | SOOOSSSSSSS | WV-1092 | rs362307 |
| | ACAGACUUC | | *SG*SG*SG*SC*SA*SC*S | | SSRSOOOS | analogue for | Human HTT |
| | | | A*RG*SmAmCmUmU*SmC | | | CMC | |
| WV-2691 | GGCACAAGGGC | 2062 | mG*SmGmCmAmC*SA*SA | 2414 | SOOOSSSSSSS | WV-1092 | rs362307 |
| | ACAGACUUC | | *SG*SG*SG*SC*SA*SC*S | | SSSROOOS | analogue for | Human HTT |
| | | | A*SG*RmAmCmUmU*SmC | | | CMC | |
| WV-2692 | GGCACAAGGGC | 2063 | mG*SmGmCmAmC*SA*SA | 2415 | SOOOSSSSSSS | WV-1092 | rs362307 |
| | ACAGACUUC | | *SG*SG*SG*SC*SA*SC*S | | SSSSOOOR | analogue for | Human HTT |
| | | | A*SG*SmAmCmUmU*RmC | | | CMC | |
| WV-2728 | GGCAC | | mG*SmGmCmAmC | | SOOO | WV-1092 | rs362307 |
| | | | | | | fragment for | Human HTT |
| | | | | | | CMC | |
| WV-2729 | GGCAC | | mG*RmGmCmAmC | | ROOO | WV-1092 | rs362307 |
| | | | | | | fragment for | Human HTT |
| | | | | | | CMC | |
| WV-2730 | ACUUC | | mAmCmUmU*SmC | | OOOS | WV-1092 | rs362307 |
| | | | | | | fragment for | Human HTT |
| | | | | | | CMC | |
| WV-2731 | ACUUC | | mAmCmUmU*RmC | | OOOR | WV-1092 | rs362307 |
| | | | | | | fragment for | Human HTT |
| | | | | | | CMC | |
| WV-2732 | GGCACAAGGGC | 2064 | mG*SmGmCmAmC*SA*SA | 2416 | SOOOSSSSSSR | WV-1092 for | rs362307 |
| | ACAGACUUC | | *SG*SG*SG*SC*RA*SC*R | | SRSSOOOS | CM | Human HTT |
| | | | A*SG*SmAmCmUmU*SmC | | | | |

### Abbreviations:

[1580] 2\′: 2′
3\′: 3′
5\′: 5′
307: SNP rs362307
C6: C6 amino linker

### F, f: 2′-F

[1581] Htt, HTT: Huntingtin gene or Huntington's Disease
Lauric, Myristic, Palmitic, Stearic, Oleic, Linoleic, alpha-Linolenic, gamma-Linolenic, DHA, Turbinaric, Dilinoleic: Lauric acid, Myristic acid, Palmitic acid, Stearic acid, Oleic acid, Linoleic acid, alpha-Linolenic acid, gamma-Linolenic acid, docosahexaenoic acid, Turbinaric acid, Dilinoleyl methanol, respectively.
muHtt or muHTT: mutant Huntingtin gene or gene product

### OMe: 2′-OMe

[1582] O, PO: phoshodiester (phosphate)

### *, PS: Phosphorothioate

[1583] R, Rp: Phosphorothioate in Rp conformation
S, Sp: Phosphorothioate in Sp conformation
X: Phosphorothioate, stereorandom

[1584] In some embodiments, a composition or method described herein can pertain to any biologically active agent described herein, which can target any gene described herein, and any lipid described herein.

[1585] In some embodiments, a composition or method described herein can pertain to any biologically active agent described herein and any lipid described herein, for the treatment of any disease described herein.

[1586] In some embodiments, a composition or method described herein can pertain to any biologically active agent described herein and any lipid described herein.

[1587] Efficacy of Composition for Delivery of a Biologically Active Agent

[1588] In some embodiments, a composition for delivery of a biologically active agent is capable of performing two different functions: (a) delivering the biologically active agent (e.g., to particular targeted cells or tissues); and (b) allowing (e.g., not preventing or interfering with) the function of the biologically active agent. In some embodiments, a lipid increase the efficacy, activity, stability, bio-availability, tissue targeting, and/or biological half-life of a biologically active agent.

[1589] As shown in FIG. 1, certain example lipids for use in preparation of a composition for delivery of a biologically active agent allow (e.g., do not prevent or interfere with) the function of the biologically active agent. Non-limiting example lipids include: lauric acid, myristic acid, palmitic acid, stearic acid, oleic acid, linoleic acid, alpha-linolenic acid, gamma-linolenic acid, docosahexaenoic acid (DHA or cis-DHA), turbinaric acid and dilinoleyl.

[1590] A biologically active agent, oligonucleotide WV-942, was tested for its biological activity in human DMD (Duchenne muscular dystrophy) myoblasts. In the absence of exon 51 skipping, the protein is severely truncated due to a frameshift mutation, leading to a premature stop codon. Oligonucleotide WV-942, which has a sequence and chemical identical to Drisapersen, also known as Kyndrisa, PRO051 and GSK2402968, is intended to allow skipping of exon 51, thus allowing production of a frame-corrected dystrophin transcript which lacks exon 51. Experimental details are provided in Example 2.

[1591] In this experiment, the myoblast cells were treated with naked WV-942 (not conjugated to any lipid), or WV-942 conjugated to any one of several lipids: lauric acid, myristic acid, palmitic acid, stearic acid, oleic acid, linoleic acid, alpha-linolenic acid, gamma-linolenic acid, docosahexaenoic acid (cis-DHA), turbinaric acid and dilinoleyl.

TABLE 1
Lipids conjugated to biologically active agent,
oligonucleotide WV-942.

| Oligonucleotide | Conjugated Acid |
|---|---|
| WV-942 | — |
| WV-2578 | Lauric acid |
| WV-2579 | Myristic Acid |
| WV-2580 | Palmitic acid |
| WV-2581 | Stearic acid |
| WV-2582 | Oleic acid |
| WV-2583 | Linoleic acid |
| WV-2584 | Alpha-Linolenic acid |
| WV-2585 | Gamma-Linolenic acid |
| WV-2586 | cis-DHA |
| WV-2587 | Turbinaric acid |
| WV-2588 | Dilinoleyl |

[1592] These results show that preparing a composition comprising a biologically active agent, WV-942, and any of several lipids (lauric acid, myristic acid, palmitic acid, stearic acid, oleic acid, linoleic acid, alpha-linolenic acid, gamma-linolenic acid, docosahexaenoic acid (cis-DHA), turbinaric acid and dilinoleyl) did not prevent biological activity of the agent; in fact, in several cases, in the addition of a lipid, biological activity was increased several-fold.

[1593] Among other things, the present disclosure encompasses the recognition that lipids can surprisingly enable and/or promote delivery of biologically active agents to their target location(s) (e.g., cells, tissues, organs, etc.) In some embodiments, lipids can be utilized to effectively improve delivery of biologically active agents to their target location(s) in a subject, e.g., in a mammal or human subject, etc. The present disclosure particularly documents the surprising achievement of efficient and/or effective delivery of biologically active agent(s) into cells (i.e., to intracellular location(s)). The present disclosure also shows the additional surprising finding that lipids can improve the pharmacokinetics (e.g., optimized half-life) of an administered biologically active agent. The present disclosure also documents the additional surprising finding that lipids can be utilized to improve immune characteristics of delivered biologically active agents, e.g., by antagonizing an immune response mediated by TLR9.

[1594] Targeting of Particular Cells or Tissues

[1595] In some embodiments, a composition for delivery of a biologically active agent is capable of targeting the biologically active agent to particular cells or tissues, as desired.

[1596] In some embodiments, a composition for delivery of a biologically active agent is capable of targeting the biologically active agent to a muscle cell or tissue. In some embodiments, the present disclosure pertains to compositions and methods related to delivery of biologically active agents, wherein the compositions comprise a biologically active agent a lipid. In various embodiments to a muscle cell or tissue, the lipid is selected from: lauric acid, myristic acid, palmitic acid, stearic acid, oleic acid, linoleic acid, alpha-linolenic acid, gamma-linolenic acid, docosahexaenoic acid (cis-DHA), turbinaric acid and dilinoleyl.

[1597] As shown in FIGS. 2 to 6, example compositions were prepared comprising a biologically active agent (WV-942) and a lipid, and these compositions were capable of delivering the biologically active agent to target cells and tissues, e.g., muscle cells and tissues. The example lipids used include stearic acid, oleic acid, alpha-linolenic acid, gamma-linolenic acids, cis-DHA, turbinaric acid and dilinoleyl acid. In these figures, “TBD” indicates that the particular composition was effective for delivery, but the numerical results were outside the standard range, and thus the final results remain to be determined; however, the compositions indicated as “TBD” in the Figures were efficacious at delivery of a biologically active agent.

[1598] As shown in FIG. 3: A composition comprising a biologically active agent and any of: stearic acid, oleic acid, alpha-linolenic acid, gamma-linolenic acid, cis-DHA or turbinaric acid, was able to deliver the biologically active agent to gastrocnemius muscle tissue.

[1599] A composition comprising a biologically active agent and any of: stearic acid, alpha-linolenic, gamma-linolenic, cis-DHA, or turbinaric acid, was able to deliver the biologically active agent to heart muscle tissue.

[1600] A composition comprising a biologically active agent and any of: stearic acid, oleic acid, alpha-linolenic acid, gamma-linolenic acid, cis-DHA or turbinaric acid, was able to deliver the biologically active agent to quadriceps muscle tissue.

[1601] As shown in FIG. 4: A composition comprising a biologically active agent and any of: stearic, oleic, alpha-linolenic, gamma-linolenic, cis-DHA, or turbinaric acid was able to deliver the biologically active agent to the gastrocnemius muscle tissue.

[1602] A composition comprising a biologically active agent and any of: stearic acid, alpha-linolenic, gamma-linolenic, cis-DHA, or turbinaric acid was able to deliver the biologically active agent to heart muscle tissue.

[1603] A composition comprising a biologically active agent and any of: dilinoleyl, stearic acid, oleic acid, alpha-linolenic, gamma-linolenic, cis-DHA or turbinaric acid was able to delivery the biologically active agent to the thoracic diaphragm muscle tissue.

[1604] In some embodiments, conjugation of a lipid to an oligonucleotide improves at least one characteristic of the oligonucleotide. In some embodiments, the characteristic is increased activity (e.g., increased ability to induce desirable skipping of a deleterious exon), decreased toxicity, or improved distribution to a tissue. In some embodiments, the tissue is muscle tissue. In some embodiments, the tissue is skeletal muscle, gastrocnemius, triceps, heart or diaphragm.

[1605] The ability of conjugation of lipids to improve the distribution of oligonucleotides is shown in FIGS. 31A to 31D.

[1606] The tested oligonucleotides (WV-3473, WV-3545, WV-3546 and WV-942) were intravenous injected via tail vein in male C57BL/10ScSndmdmdx mice (4-5 weeks old), at 10 mg/kg or 30 mg/kg. Tissues were harvested on Day 2, 7 and 14 after injection, fresh-frozen in liquid nitrogen and stored in −80° C. until analysis.

[1607] Hybrid-ELISA is used to quantify the ASO levels in tissue using test article serial dilution as standard curve: Maleic anhydride activated 96 well plate (Pierce 15110) was coated 50 μL of capture probe at 500 nM in 2.5% NaHCO₃(Gibco, 25080-094) for 2 hours at 37° C. The plate then washed 3 times with PBST (PBS+0.1% Tween-20), blocked with 5% fat free milk-PBST at 37° C. for 1 hour. Test article ASO was serial diluted into matrix. This standard together with original samples were diluted with lysis buffer (4 M Guanidine; 0.33% N-Lauryl Sarcosine; 25 mM Sodium Citrate; 10 mM DTT) so that ASO amount in all samples is less than 100 ng/ml. 20 μL of diluted samples were mixed with 180 μL of 333 nM detection probe diluted in PBST, then denatured in PCR machine (65° C., 10 min, 95° C., 15 min, 4° C. ∞). 50 μL of denatured samples were distributed in blocked ELISA plate in triplicates, and incubated overnight at 4° C. After 3 washes of PBST, 1:2000 streptavidin-AP in PBST was added, 50 μL per well and incubated at room temperature for 1 hour. After extensive wash with PBST, 100 μL of AttoPhos (Promega S1000) was added, incubated at room temperature in dark for 10 min and read on plate reader (Molecular Device, M5) fluorescence channel: Ex 435 nm, Em 555 nm. The ASO in samples were calculated according to standard curve by 4-parameter regression.

[1608] In some embodiments, for example as shown in certain Figures, WV-3473 has no detectable level in Gastrocnemius, Triceps, Heart or Diaphragm, in contrast to WV-942. The stability of WV-3473 is good in both plasma and tissue homogenates. In some embodiments, for example as demonstrated in certain Figures, lipid-conjugation of WV-3473 improves the muscle distribution of WV-3473, often without impacting removal of oligonucleotides from a system.

[1609] Thus: A composition comprising a lipid, selected from: lauric acid, myristic acid, palmitic acid, stearic acid, oleic acid, linoleic acid, alpha-linolenic acid, gamma-linolenic acid, docosahexaenoic acid (cis-DHA), turbinaric acid and dilinoleyl, and a biologically active agent is capable of delivering the biologically active agent to extra-hepatic cells and tissues, e.g., muscle cells and tissues.

### Pharmacokinetics

[1610] In some embodiments, one or more characteristics of pharmacokinetics of a drug (e.g., a drug comprising a biologically active agent, including but not limited to an oligonucleotide) can be optimized by conjugation with a lipid.

[1611] In some embodiments, pharmacokinetics pertains to analysis of drug metabolism, including analysis of the fate of a drug from the moment of administration to the time of elimination from the body. Pharmacokinetics can encompass, as a non-limiting example, the quantification of a drug or its metabolite in a particular tissue (e.g., blood or muscle) over time.

[1612] Various pharmacokinetic characteristics include, but are not limited to: Cₘₐₓ, peak plasma concentration of a drug after administration; tₘₐₓ, time to reach Cₘₐₓ; Cₘᵢₙ, lowest (trough) concentration that a drug reaches before the next dose is administered; Elimination half-life, the time required for the concentration of the drug to reach half of its original value; Elimination rate constant, rate at which a drug is removed from the body; Area under the curve, integral of the concentration-time curve (after a single dose or in steady state); and Clearance, volume of plasma cleared of the drug per unit time.

[1613] Various pharmacokinetic characteristics of a particular drug can be influenced by any one or more of: total dose, number of dosages, rate of administration, method of administration, administration vehicle, bodily site of administration, etc. Various characteristics of pharmacokinetics and various influences on them are known in the art.

[1614] The present disclosure, among other things, shows that one or more characteristics of pharmacokinetics of a drug comprising a biologically active agent (e.g., an oligonucleotide) can be affected, improved and/or optimized by conjugation of the agent to a lipid.

[1615] In general, it is noted that optimization of a pharmacokinetic characteristic such as half-life can be distinguished from maximization. In some embodiments, in general, it may be desirable for a particular drug to have a half-life sufficient to allow performance of its desired function, but short enough to minimize off-target effects and other toxicity. Thus, in some embodiments, an optimized half-life is long enough to allow activity while minimizing toxicity; a prolonged or maximized half-life may be undesirable.

[1616] The present disclosure shows that conjugation with a lipid can improve the half-life of a biologically active agent. FIGS. 31A to 31D show the distribution of oligonucleotides (including some conjugated to a lipid) in various muscle tissues. Muscles tested include: gastrocnemius (FIG. 31A); triceps (FIG. 31B); heart (FIG. 31C); and diaphragm (FIG. 31D). Control oligonucleotide WV-942 is equivalent to Drisapersen, which has an undesirably long half-life, which can contribute to toxicity. Test oligonucleotide WV-3473 was administered to animals naked, or conjugated to a lipid (stearic acid, WV-3545; or turbinaric acid, WV-3546). In some of the assays, conjugation to a lipid improved half-life of the oligonucleotide, without extending it to an undesirably long length. See, for example, FIG. 30C, which shows that conjugation of either stearic acid or turbinaric acid to the oligonucleotide, which administered at 30 mg/kg, increased distribution to heart tissue, particularly at Day 3 and 8, but did not increase it to the level of WV-942, which is known to have an undesirably long half-life.

### Lipids, Immunostimulation and TLR9

[1617] In some embodiments, the present disclosure encompasses the surprising finding that lipid conjugation can effectively antagonize an immune response, e.g., that mediated by TLR9.

[1618] In some embodiments, example data demonstrated that many of provided oligonucleotides do not mediate an immune response, as determined by a lack of agonism of hTLR9; see FIG. 26. Among other things, the present disclosure demonstrates that oligonucleotides conjugated to lipids surprisingly counteracted hTLR9 agonism, for example, that mediated by control oligonucleotide ODN2006 (e.g., conjugation of lipids to oligonucleotides antagonizes hTLR9 activity mediated by ODN2006); for examples, see FIGS. 27 and 28, WV-3545 and WV-3546 (which are oligonucleotides to the target Dystrophin). Other oligonucleotides comprising lipid moieties were also tested and were shown to have greatly enhanced ability to antagonize hTLR9 activity. For example, WV-2824 and WV-2830, conjugates of Malat1-targeting WV-2735 with stearic acid (WV-2824) and turbinaric acid (WV-2830), respectively, also demonstrated greatly enhanced ability to antagonize hTLR9 activity mediated by ODN2006. Among other things, these experiments show that conjugation of lipids, such as stearic acid, turbinaric acid, etc., with oligonucleotides can greatly increase hTLR9 antagonist activity.

[1619] TLR9 is Toll-Like Receptor 9, also known as CD289; RefSeq (mRNA) NM_017442; RefSeq (protein) NP_059138. hTLR9 is human TLR9.

[1620] Microarray

[1621] In some embodiments, the present disclosure pertains to a microarray comprising a collection of one or more chirally controlled oligonucleotides. In some embodiments, a microarray comprises multiple spatially defined regions, wherein each region comprises a chirally controlled oligonucleotide composition. In some embodiments, a microarray comprises a solid phase support having a surface (e.g., a planar surface), which carries a collection of types of chirally controlled oligonucleotides, wherein each type is immobilized to a spatially defined region or site on the surface, wherein the region or site of one type does not overlap with the region or site of any other type. In some embodiments, oligonucleotides of different types can differ in base sequence (e.g., comprising overlapping or tiled sequences), pattern of backbone modification, pattern of stereochemistry, and/or conjugation with any of a variety of lipids or other moieties.

[1622] In some embodiments, a microarray can be used in for a variety of purposes. In some embodiments, a microarray can be used to test the comparative qualities of various aspects (e.g., base sequence, pattern of backbone modification, pattern of stereochemistry, and/or conjugation with a lipid or other moiety) of different types of oligonucleotides. In some embodiments, different types of oligonucleotides can be tested for their ability to bind to particular target proteins or nucleic acids, ability to mediate RNA interference, ability to alter exon skipping (e.g., increasing desired skipping or decrease undesired skipping), ability to mediate knockdown via a RNAseH mechanism, resistance to nucleases, immunogenicity, TLR9 agonism and/or antagonism, etc. Using a microarray, in some embodiments multiple types of oligonucleotides can be exposed to the same experimental fluids and test conditions, and thus multiple types of oligonucleotides can be simultaneously tested. As a non-limiting example, in order to test resistance of multiple types of oligonucleotides to a nuclease, various types of oligonucleotides can be immobilized in different regions on a microarray, which is then subjected to a fluid comprising a nuclease. The relative resistance of various oligonucleotide types to nuclease degradation can be readily determined. As another non-limiting example, in order to test the relative ability of different oligonucleotide types to mediate RNA interference, different types can be immobilized in different regions of a microarray, which is then treated with a fluid comprising the various components required for testing RNA interference (mRNA target, RNA interference complex, buffer, detection moieties, etc.); the relative ability of different oligonucleotide types to mediate RNA interference can thus be readily determined. Any method known in the art can be used to determine the relative activity of interest of each oligonucleotide type, including but not limited to: detection or use of fluorescent, chemiluminescent, chemical, or radioactive markers, labels or dyes.

[1623] Methods of producing microarrays, which may also be referred to as gene chips, gene arrays, or nucleic acid chips, or by other terms, are known in the art and can be used in accordance with the present disclosure. In some embodiments, microarrays are produced by robots. In some embodiments, a method of producing a microarray comprises a step of separately producing various oligonucleotide types and then a step of depositing various oligonucleotide types on designated regions of a microarray. In some embodiments, for each oligonucleotide type, a fine needle or pin is dipped into a well comprising that type, and the needle or pin used to deposit each type onto a microarray. In some embodiments, a method of producing a microarray comprises a step of polymerizing various oligonucleotide types on designated regions of a microarray. Various methods of making microarrays are known in the art. Also known in the art are various materials from which a microarray can be constructed (glass, plastic, polystyrene, etc.).

[1624] In some embodiments, a microarray comprises a collection of beads, wherein each bead is physically discrete from each other, but wherein various beads are mixed or combined in a single sample. Each bead or type of bead (e.g., a particular type of bead to which is immobilized an oligonucleotide type) can comprise, for example, a specific ratio of two or more quantification agents (e.g., dyes), such that beads can be differentiated and the relative activity of each oligonucleotide type can be determined.

[1625] In some embodiments, the present disclosure pertains to a collection of types of oligonucleotide types, wherein each type is defined by any one or more of: base sequence, pattern of backbone modification, pattern of stereochemistry, and/or conjugation with a lipid or other moiety. The collection (e.g., a microarray) can be used to test the relative qualities or abilities or various oligonucleotide types.

[1626] Additional Optional Components of the Composition

[1627] In some embodiments, the present disclosure pertains to compositions and methods related to delivery of biologically active agents, wherein the compositions comprise a biologically active agent and a lipid comprising a C₁₀-C₄₀ linear, saturated or partially unsaturated, aliphatic chain. In some embodiments, the present disclosure pertains to compositions and methods related to delivery of biologically active agents, wherein the compositions comprise a biologically active agent and a lipid comprising a C₁₀-C₄₀ linear, saturated or partially unsaturated, aliphatic chain, optionally substituted with one or more C₁₋₄ aliphatic group.

[1628] In some embodiments, the present disclosure pertains to compositions and methods related to delivery of biologically active agents, wherein the compositions comprise a biologically active agent and a lipid. In various embodiments, the lipid is selected from: lauric acid, myristic acid, palmitic acid, stearic acid, oleic acid, linoleic acid, alpha-linolenic acid, gamma-linolenic acid, docosahexaenoic acid (cis-DHA), turbinaric acid and dilinoleyl.

[1629] In various embodiments, the composition for delivery of a biologically active agent furhter comprises an additional, optional, component. In various embodiments, the additional optional component is selected from: one or more additional lipids; a targeting compound or moiety; a 3′ end cap (in the example of a nucleic acid); and a carbonic anhydrase inhibitor.

[1630] In some embodiment, a composition comprises a lipid, a biologically active agent and any one or more additional components selected from: a polynucleotide, a dye, an intercalating agent (e.g. an acridine), a cross-linker (e.g. psoralene, or mitomycin C), a porphyrin (e.g., TPPC4, texaphyrin, or Sapphyrin), a polycyclic aromatic hydrocarbon (e.g., phenazine, or dihydrophenazine), an artificial endonuclease, a chelating agent, EDTA, an alkylating agent, a phosphate, an amino, a mercapto, a PEG (e.g., PEG-40K), MPEG, [MPEG]₂, a polyamino, an alkyl, a substituted alkyl, a radiolabeled marker, an enzyme, a hapten (e.g. biotin), a transport/absorption facilitator (e.g., aspirin, vitamin E, or folic acid), a synthetic ribonuclease, a protein, e.g., a glycoprotein, or peptide, e.g., a molecule having a specific affinity for a co-ligand, or antibody e.g., an antibody, a hormones, a hormone receptor, a non-peptidic species, a lipid, a lectin, a carbohydrate, a vitamin, a cofactor, a carbonic anhydrase inhibitor, or a drug.

[1631] In some embodiment, a composition comprises a lipid, a biologically active agent and any one or more additional components, wherein the one or more additional components comprises or consists of a carbonic anhydrase inhibitor. Carbonic anhydrases are a family of 16 members that regulate intracellular and extracellular pH. In some embodiments, the expression of the CA3 gene is strictly tissue-specific and present at high levels in skeletal muscle and much lower levels in cardiac and smooth muscle. In some embodiments, CA3 is insufficient in muscles of Myasthenia Gravis patients. In some embodiments, a proportion of carriers of Duchenne muscle dystrophy have a higher CA3 level than normal. In some embodiments, CA IV, the first membrane-associated isoform to be studied, is expressed in a wide variety of tissues including kidney, heart, lung, gall bladder, distal small intestine, colon, and skeletal muscle. In some embodiments, in human tissues CA XIV is expressed in heart, followed by brain, skeletal muscle, and liver; no signal was seen in lung or kidney. In some embodiments, a carbonic anhydrase inhibitor inhibits a CA3, CA IV, CA XIV and/or any one or more CA genes and/or gene products. A non-limiting example of a CA inhibitor, along with a linker for linking the CA inhibitor to a biologically active agent, is shown in FIG. 30.

### Additional Lipids

[1632] In some embodiments, the present disclosure pertains to compositions and methods related to a composition comprising a biologically active agent and a lipid comprising a C₁₀-C₄₀ linear, saturated or partially unsaturated, aliphatic chain. In some embodiments, the present disclosure pertains to compositions and methods related to a composition comprising a biologically active agent and a lipid comprising a C₁₀-C₄₀ linear, saturated or partially unsaturated, aliphatic chain, optionally substituted with one or more C₁₋₄ aliphatic group.

[1633] In some embodiments, the present disclosure pertains to compositions and methods related to a composition comprising: a biologically active agent; a lipid comprising a C₁₀-C₄₀ linear, saturated or partially unsaturated, aliphatic chain; and an additional lipid or lipids. In some embodiments, the present disclosure pertains to compositions and methods related to a composition comprising: a biologically active agent; a lipid comprising a C₁₀-C₄₀ linear, saturated or partially unsaturated, aliphatic chain, optionally substituted with one or more C₁₋₄ aliphatic group; and an additional lipid or lipids.

[1634] In various embodiments, the composition for delivery of a biologically active agent comprises: a biologically active agent; a lipid selected from: lauric acid, myristic acid, palmitic acid, stearic acid, oleic acid, linoleic acid, alpha-linolenic acid, gamma-linolenic acid, docosahexaenoic acid (cis-DHA), turbinaric acid and dilinoleyl; and an additional lipid or lipids.

[1635] In some embodiments, an additional lipid or lipids is selected from: lauric acid, myristic acid, palmitic acid, stearic acid, oleic acid, linoleic acid, alpha-linolenic acid, gamma-linolenic acid, docosahexaenoic acid (cis-DHA), turbinaric acid and dilinoleyl. As a non-limiting example: In various embodiments, the composition for delivery of a biologically active agent comprises a biologically active agent, and two or more lipids selected from: lauric acid, myristic acid, palmitic acid, stearic acid, oleic acid, linoleic acid, alpha-linolenic acid, gamma-linolenic acid, docosahexaenoic acid (cis-DHA), turbinaric acid and dilinoleyl.

[1636] In various embodiments, the additional lipid or lipids can be selected from: an amino lipid; an amphipathic lipid; an anionic lipid; an apolipoprotein; a cationic lipid; a low molecular weight cationic lipid; a cationic lipid such as CLinDMA and DLinDMA; an ionizable cationic lipid; a cloaking component; a helper lipid; a lipopeptide; a neutral lipid; a neutral zwitterionic lipid; a hydrophobic small molecule; a hydrophobic vitamin; a PEG-lipid; an uncharged lipid modified with one or more hydrophilic polymers; phospholipid; a phospholipid such as 1,2-dioleoyl-sn-glycero-3-phosphoethanolamine; a stealth lipid; a sterol; a cholesterol; and a targeting lipid or other targeting component; and any other lipid described herein or reported in the art. In various embodiments, the additional lipids can comprise a combination of lipids, as a non-limiting example, an amino-lipid, a cationic lipid, a helper lipid and/or a PEG-lipid and/or a hydrophobic small molecule. Additional components that may be present in a lipid particle include bilayer stabilizing components such as polyamide oligomers (see, U.S. Pat. No. 6,320,017), peptides, proteins, detergents, lipid-derivatives, such as PEG coupled to phosphatidylethanolamine and PEG conjugated to ceramides (see, U.S. Pat. No. 5,885,613).

[1637] The types and ratios of various lipids (e.g., a lipid and an additional, optional lipid or lipids) in the composition can be modulated to perform any one or more of the following: improve cellular or tissue targeting; improve cellular uptake; improve endosomal escape; reduce liver toxicity; increase efficiency of delivery; increase tolerability; improve consistency in size of lipid nanoparticles; reduce aggregation of lipid nanoparticles; prevent charge-induced aggregation of lipid nanoparticles; improve chemical stability, improve half-life in circulation, and/or reduce degradation of the biologically active agent (e.g., by nucleases in the case of nucleic acids, or proteases in the case of proteins).

[1638] The composition for delivery of the present disclosure can be in the form of a lipid nanoparticle (LNP). As used herein, the term “lipid nanoparticles” includes liposomes irrespective of their lamellarity, shape or structure and lipoplexes as described for the introduction of pDNA into cells (PNAS, 1987, 84, 7413). These lipid nanoparticles can be complexed with biologically active agents and are useful as in vivo delivery vehicles.

[1639] Various lipids are described below, and/or reported in the art, including, as non-limiting examples: U.S. Pat. Nos. 9,315,437; 9,278,130; 9,254,327; 9,242,001; and 9,220,785; US patent applications: US 2009/0263407, US 2009/0285881, US 2010/0055168, US 2010/0055169, US 2010/0063135, US 2010/0076055, US 2010/0099738, and US 2010/0104629; Semple S. C. et al., Rational design of cationic lipids for siRNA delivery, Nature Biotechnology, published online 17 Jan. 2010; doi:10.1038/nbt.1602; and documents cited therein.

[1640] In some embodiments, an additional lipid or lipids comprises an amino lipid. As a non-limiting example, an amino lipid includes a lipid having at least one nitrogen atom incorporated in at least one fatty acid chain. This fatty acid chain may be an alkyl, alkenyl or alkynyl carbon chain. As non-limiting examples, lipids contain carbon chain lengths in the range from C10 to C20. The fatty acid portion of the amino-lipid can be incorporated through the use of suitable carbonyl compounds such as aldehydes (R—CHO) and ketones (R—CO—R). Through the use of asymmetrical ketones (R—CO—R′) corresponding unsymmetrical substituted lipids can be prepared. Likewise, through the use of carbonyl ethers, esters, carbamates and amides and suitable reducing agents the corresponding amino-lipids are accessible.

[1641] In some embodiments, an additional lipid or lipids comprises an amphipathic lipid. As a non-limiting example, an amphipathic lipid includes any suitable material, wherein the hydrophobic portion of the lipid material orients into a hydrophobic phase, while the hydrophilic portion orients toward the aqueous phase. Such compounds include, but are not limited to, phospholipids, aminolipids, and sphingolipids. Additionally, such amphipathic lipids can be readily mixed with other lipids, such as triglycerides and sterols.

[1642] In some embodiments, an additional lipid or lipids comprises an anionic lipid. As non-limiting examples, an anionic lipid includes a compound selected from phosphatidylglycerol, cardiolipin, diacylphosphatidylserine, diacylphosphatidic acid, N-dodecanoyl phosphatidylethanoloamine, N-succinyl phosphatidylethanolamine, N-glutaryl phosphatidylethanolamine, lysylphosphatidylglycerol and other anionic modifying groups joined to neutral lipids.

[1643] In some embodiments, an additional lipid or lipids comprises an apolipoprotein, also known as a lipoprotein, or a fragment thereof. As non-limiting examples, apolipoproteins include ApoA-I, ApaA-II, ApoA-IV, ApaA-V and ApoE, and active polymorphic forms, isoforms, variants and mutants as well as fragments or truncated forms thereof. In certain embodiments, the apolipoprotein is a thiol-containing apolipoprotein, which contains at least one cysteine residue. The most common thiol-containing apolipoproteins are ApoA-I Milano (ApoA-IM) and ApoA-I Paris (ApoA-Ip), which contain one cysteine residue (Jia et al., 2002, Biochem. Biophys. Res. Comm. 297: 206-13; Bielicki and Oda, 2002, Biochemistry 41: 2089-96). ApoA-II, ApoE2 and ApoE3 are also thiol-containing apolipoproteins. Isolated ApoE and/or active fragments and polypeptide analogues thereof, including recombinantly produced forms thereof, are described in U.S. Pat. Nos. 5,672,685; 5,525,472; 5,473,039; 5,182,364; 5,177,189; 5,168,045; and 5,116,739. ApoE3 is disclosed in Weisgraber, et al., “Human E apoprotein heterogeneity: cysteine-arginine interchanges in the amino acid sequence of the apo-E isoforms,” J. Biol. Chem. (1981) 256: 9077-9083; and Rall, et al., “Structural basis for receptor binding heterogeneity of apolipoprotein E from type III hyperlipoproteinemic subjects,” Proc. Nat. Acad. Sci. (1982) 79: 4696-4700. See also GenBank accession number K00396. In certain embodiments, the apolipoprotein can be in its mature form, in its (preproapolipoprotein form or in its proapolipoprotein form, Homo- and heterodimers (where feasible) of pro- and mature ApoA-I (Duverger et al., 1996, Arterioscler. Thromb. Vase. Biol. 16(12):1424-29), ApoA-I Milano (Klon et al., 2000, Biophys. J. 79:(3)1679-87; Franceschini et al., 1985, J. Biol. Chem. 260: 1632-35), ApoA-I Paris (Daum et al., 1999, J. Mol. Med. 77:614-22), ApoA-II (Shelness et al., 1985, J. Biol. Chem. 260(14):8637-46; Shelness et al., 1984, J. Biol. Chem. 259(15):9929-35), ApoA-IV (Duverger et al., 1991, Euro. J. Biochem. 201(2):373-83), and ApoE (McLean et al., 1983, J. Biol. Chem. 258(14):8993-9000) can also be utilized.

[1644] In some embodiments, an additional lipid or lipids comprises a cationic lipid. In a non-limiting example, a cationic lipid is an amino lipid. As a non-limiting example, a cationic lipid includes a lipid comprising a quaternary amine with a nitrogen atom having four organic substituents. Non-limiting examples of cationic lipids comprising a quaternary amine include N-(2,3-dioleyloxy)propyl)-N,N,N-trimethylammonium chloride (“DOTAP”), N,N-Distearyl-N,N-dimethylammonium bromide (“DDBA”), 1-methyl-4-(cis-9-dioleyl)-methylpyridinium-chloride (“SAINT-solid”)N-(2,3-dioleyloxy)propyl)-N,N,N-triethylammonium chloride (“DOTMA”), N,N-dioleyl-N,N-dimethylammonium chloride (“DODAC”), (1,2-dimyristyloxyprop-3-yl)-N,N-dimethyl-N-hydroxyethyl ammonium bromide (“DIMRIE”), N,N-dioleyl-N,N-dimethylammonium chloride (“DODAC”); N-(2,3-dioleyloxy)propyl-N,N—N-triethylammonium chloride (“DOTMA”); N,N-distearyl-N,N-dimethylammonium bromide (“DDAB”); N-(2,3-dioleoyloxy)propyl)-N,N,N-trimethylammonium chloride (“DOTAP”); 1,2-Dioleyloxy-3-trimethylaminopropane chloride salt (“DOTAP.Cl”); 3beta-(N—(N′,N′-dimethylaminoethane)-carbamoyl)cholesterol (“DC-Chol”), N-(1-(2,3-dioleyloxy)propyl)-N-2-(sperminecarboxamido)ethyl)-N,N-dimethyl-ammonium trifluoracetate (“DOSPA”), dioetadecylamidoglycyl carboxyspermine (“DOGS”), 1,2-dileoyl-sn-3-phosphoethanolamine (“DOPE”), 1,2-dioleoyl-3-dimethylammonium propane (“DODAP”), N,N-dimethyl-2,3-dioleyloxy)propylamine (“DODMA”), and N-(1,2-dimyristyloxyprop-3-yl)-N,N-dimethyl-N-hydroxyethyl ammonium bromide (“DMRIE”). Additionally, a number of commercial preparations of cationic lipids can be used, such as, e.g., LIPOFECTIN (including DOTMA and DOPE, available from GIBCO/BRL), and LIPOFECTAMINE, (comprising DOSPA and DOPE, available from GIBCO/BRL). As a non-limiting example, a cationic lipid can have certain design features including a head group, one or more hydrophobic tails, and a linker between the head group and the one or more tails. The head group can include an amine; for example an amine having a desired pKa. The pKa can be influenced by the structure of the lipid, particularly the nature of head group; e.g., the presence, absence, and location of functional groups such as anionic functional groups, hydrogen bond donor functional groups, hydrogen bond acceptor groups, hydrophobic groups (e.g., aliphatic groups), hydrophilic groups (e.g., hydroxyl or methoxy), or aryl groups. The head group amine can be a cationic amine; a primary, secondary, or tertiary amine; the head group can include one amine group (monoamine), two amine groups (diamine), three amine groups (triamine), or a larger number of amine groups, as in an oligoamine or polyamine. The head group can include a functional group that is less strongly basic than an amine, such as, for example, an imidazole, a pyridine, or a guanidinium group. The head group can be zwitterionic. Other head groups are suitable as well. The one or more hydrophobic tails can include two hydrophobic chains, which may be the same or different. The tails can be aliphatic; for example, they can be composed of carbon and hydrogen, either saturated or unsaturated but without aromatic rings. The tails can be fatty acid tails; some such groups include octanyl, nonanyl, decyl, lauryl, myristyl, palmityl, stearyl, alpha-linoleyl, stearidonyl, linoleyl, gamma-linolenyl, arachadonyl, oleyl, and others. Other hydrophobic tails are suitable as well. The linker can include, for example, a glyceride linker, an acyclic glyceride analog linker, or a cyclic linker (including a spiro linker, a bicyclic linker, and a polycyclic linker). The linker can include functional groups such as an ether, an ester, a phosphate, a phosphonate, a phosphorothioate, a sulfonate, a disulfide, an acetal, a ketal, an imine, a hydrazone, or an oxime. Other linkers and functional groups are suitable as well.

[1645] In some embodiments, an additional lipid or lipids comprises a cloaking component. As a non-limiting example, a cloaking component can include a fusion delaying component. As non-limiting examples, the cloaking component can include an ATTA-lipid conjugate or a PEG-lipid conjugate, and can simply exchange out of the lipid particle membrane over time. By the time the lipid particle is suitably distributed in the body, it has lost sufficient cloaking agent so as to be fusogenic.

[1646] In some embodiments, an additional lipid or lipids comprises a helper lipid. Non-limiting examples of helper lipids include 1,2-distearoyl-sa-glycero-3-phosphocholine (“DSPC”), 1,2-dipalmitoyl-sn-glycero-3-phosphocholine (“DPPC”), or any related phosphatidylcholine such as natural sphingomyelin (“SM”) and synthetic derivatives thereof such as 1-oleoyl-2-cholesteryl-hemisuccinoyl-sn-glycero-3-phosphocholine (“OChemsPC”). Other helper lipids include 1,2-dileoyl-sn-3-phosphoethanolamine (“DOPE”), 1,2-diphytanoyl-sn-glycero-3-phosphoethanol-amine (“ME 16:0 PE”).

[1647] In some embodiments, an additional lipid or lipids comprises a lipopeptide compound. As a non-limiting example, a lipopeptide compound includes a central peptide and having lipophilic groups attached at each terminus, and salts and uses thereof. The lipophilic groups can be derived from a naturally-occurring lipid, or can be a C(1-22)alkyl, C(6-12)cycloalkyl, C(6-12)cycloalkyl-alkyl, C(3-18)alkenyl, C(3-18)alkynyl, C(1-5)alkoxy-C(1-5)alkyl, or a sphinganine, or (2R,3R)-2-amino-1,3-octadecanediol, icosasphinganine, sphingosine, phytosphingosine, and cis-4-sphingenine.

[1648] In some embodiments, an additional lipid or lipids comprises a PEG-lipid. As a non-limiting example, a PEG-lipid includes an uncharged lipid modified with one or more hydrophilic polymers, e.g. polyethylene glycol (herein also referred to as “PEG-lipids”) to stabilize the lipid nanoparticle and to avoid aggregation. The polyethylene glycol (PEG) size can vary from approximately 1 to 5 approximately kDa. Depending on the relative amounts of these molecules in the formulation and the length of the hydrocarbon chain, the PEG-lipid can influence the pharmacokinetic characteristics, biodistribution, and efficacy of a formulation. PEG lipids having relatively short lipid hydrocarbon chains of about 14 carbons dissociate from the LNP in vivo in plasma with a half-life of less than 1 h. In contrast, a PEG lipid with a relatively long lipid hydrocarbon chain length of about 18 carbons circulates fully associated with the formulation for several days. Hence, in one embodiment, the PEG lipid comprises a lipid hydrocarbon chain of 12 to 20 carbon atoms, 14 to 18 carbon atoms, or 14 carbon atoms. Non-limiting examples of suitable PEG modified lipids include pegylated ceremide conjugates, pegylated distearoylphosphatidyl-ethanolamine (PEG-DSPE). Other compounds that can be used to stabilize lipid nanoparticles include gangliosides (GMt, GM3, etc.). As a non-limiting example, PEG lipids have a PEG size ranging from about 1 to about 2 KDa. Specific examples are methoxy-polyethyleneglycol-carbamoyl-dimyristyloxy-propylamine (PEG2000-c-DMA), and (alpha-(3′-(1,2-dimyristoyl-3-propanoxy)carboxamide-propyl]-.omega.-met-hoxy-polyoxyethylene (PEG2000-c-DOMG). In some embodiments, a PEG-lipid is polyethyleneglycol-dimyristoyl-phosphatidylethanolamine.

[1649] In some embodiments, an additional lipid or lipids comprises a hydrophobic small molecule. In a non-limiting example, a hydrophobic small molecule includes a compound with a molecular weight of about 300 to about 700 Da comprising 2 or more carbon- or heterocycles providing a rigid core structure. As a non-limiting example, a hydrophobic small molecule is selected from the group of sterols such as cholesterol or stigmasterol or a hydrophobic vitamin such as tocopherol. In a non-limiting example, a hydrophobic small molecule is cholesterol.

[1650] In some embodiments, an additional lipid or lipids comprises a neutral lipids. As a non-limiting example a neutral lipid can include any of a number of lipid species which exist either in an uncharged or neutral zwitterionic form at physiological pH. Such lipids include, for example diacylphosphatidylcholine, diacylphosphatidylethanotamine, ceramide, sphingomyelin, dihydrosphingomyelin, cephalin, and cerebrosides. The selection of neutral lipids for use in the particles described herein is generally guided by consideration of, e.g., liposome size and stability of the liposomes in the bloodstream. As a non-limiting example, a neutral lipid component is a lipid having two acyl groups, (i.e., diacylphosphatidylcholine and diacylphosphatidylethanolamine). Lipids having a variety of acyl chain groups of varying chain length and degree of saturation are available or may be isolated or synthesized by well-known techniques. In one group of embodiments, lipids contain saturated fatty acids with carbon chain lengths in the range of C₁₀ to C₂₀. In another group of embodiments, lipids with mono or diunsaturated fatty acids with carbon chain lengths in the range of C₁₀ to C₂₀ are used. Additionally, lipids having mixtures of saturated and unsaturated fatty acid chains can be used. As a non-limiting example, a neutral lipid is DOPE, DSPC, POPC, DPPC or any related phosphatidylcholine. The neutral lipids may also be composed of sphingomyelin, dihydrosphingomyeline, or phospholipids with other head groups, such as serine and inositol.

[1651] In some embodiments, an additional lipid or lipids comprises a phospholipid. As a non-limiting example, the phospholipid includes 1,2-dioleoyl-sn-glycero-3-phosphoethanolamine. Additional non-limiting examples of phospholipids include sphingomyelin, phosphatidylcholine, phosphatidylethanolamine, phosphatidylserine, phosphatidylinositol, phosphatidic acid, palmitoyloleoyl phosphatdylcholine, lysophosphatidylcholine, lysophosphatidylethanolamine, dipalmitoylphosphatidylcholine, dioleoylphosphatidylcholine, distearoylphosphatidylcholine, or dilinoleoylphosphatidylcholine. Other phosphorus-lacking compounds, such as sphingolipids, glycosphingolipid families, diacylglycerols, and beta-acyloxyacids.

[1652] In some embodiments, an additional lipid or lipids comprises a stealth lipid. In a non-limiting example, a stealth lipid comprises a hydrophilic head and lipid moiety; in various embodiments, a stealth lipid can improve in vivo potency, increase efficacy, and/or decrease toxicity. Non-limiting examples of stealth lipids are provided, for example in WO 2011/076807.

[1653] In some embodiments, an additional lipid or lipids comprises a sterol. In a non-limiting example, a sterol is a steroid alcohol, or a member of a subgroup of steroids. In a non-limiting example, a sterol can be any of those sterols conventionally used in the field of liposome, lipid vesicle or lipid particle preparation. In a non-limiting example, a sterol is cholesterol. In a non-limiting example, a sterol is a Cholesterol, Ergosterol, Hopanoid, Phytosterol, or Steroid.

[1654] In some embodiments, an additional lipid or lipids comprises a targeting lipid or other targeting component. In non-limiting examples, a targeting lipid or other targeting component targets the lipid particles using targeting moieties that are specific to a cell type or tissue. Targeting of lipid particles using a variety of targeting moieties, such as ligands, cell surface receptors, glycoproteins, vitamins e.g., riboflavin) and monoclonal antibodies, has been previously described (see, e.g., U.S. Pat. Nos. 4,957,773 and 4,603,044). The targeting moieties can comprise the entire protein or fragments thereof. Targeting mechanisms generally require that the targeting agents be positioned on the surface of the lipid particle in such a manner that the target moiety is available for interaction with the target, for example, a cell surface receptor. A variety of different targeting agents and methods are known and available in the art, including those described, e.g., in Sapra, P. and Allen, T M, Prog. Lipid Res. 42(5):439-62 (2003); and Abra, R M et al., J. Liposome Res. 12:1-3, (2002). The use of lipid particles, i.e., liposomes, with a surface coating of hydrophilic polymer chains, such as polyethylene glycol (PEG) chains, for targeting has been proposed (Allen, et al., Biochimica et Biophysica Acta 1237: 99-108 (1995); DeFrees, et al., Journal of the American Chemistry Society 118: 6101-6104 (1996); Blume, et al., Biochimica et Biophysica Acta 1149: 180-184 (1993); Klibanov, et al., Journal of Liposome Research 2: 321-334 (1992); U.S. Pat. No. 5,013,556; Zalipsky, Bioconjugate Chemistry 4: 296-299 (1993); Zalipsky, FEBS Letters 353: 71-74 (1994); Zalipsky, in Stealth Liposomes Chapter 9 (Lasic and Martin, Eds) CRC Press, Boca Raton Fla. (1995). In one approach, a ligand, such as an antibody, for targeting the lipid particle is linked to the polar head group of lipids forming the lipid particle. In another approach, the targeting ligand is attached to the distal ends of the PEG chains forming the hydrophilic polymer coating (Klibanov, et al., Journal of Liposome Research 2: 321-334 (1992); Kirpotin et al., FEBS Letters 388: 115-118 (1996)). Standard methods for coupling the target agents can be used. For example, phosphatidylethanolamine, which can be activated for attachment of target agents, or derivatized lipophilic compounds, such as lipid-derivatized bleomycin, can be used.

[1655] In various embodiments, the additional lipid or lipids comprises any lipid described herein or reported in the art. In various embodiments, the additional lipid or lipids comprises: 5-heptadecylbenzene-1,3-diol (resorcinol), cholesterol hemisuccinate (CHEMS), dipalmitoylphosphatidylcholine (DPPC), distearoylphosphatidylcholine (DSPC), phosphocholine (DOPC), dimyristoylphosphatidylcholine (DMPC), phosphatidylcholine (PLPC), phosphatidylethanolamine (PE), egg phosphatidylcholine (EPC), dilauryloylphosphatidylcholine (DLPC), dimyristoylphosphatidylcholine (DMPC), 1-myristoyl-2-palmitoyl phosphatidylcholine (MPPC), 1-palmitoyl-2-myristoyl phosphatidylcholine (PMPC), 1,2-diarachidoyl-sn-glycero-3-phosphocholine (DBPC), 1-palmitoyl-2-stearoyl phosphatidylcholine (PSPC), I-stearoyl-2-palmitoyl phosphatidylcholine (SPPC), 1,2-distearoyl-sn-glycero-3-phosphocholine (DAPC), 1,2-dieicosenoyl-sn-glycero-3-phosphocholine (DEPC), palmitoyloleoyl phosphatidylcholine (POPC), lysophosphatidyl choline, dilinoleoylphosphatidylcholine distearoylphophatidylethanolamine (DSPE), dimyristoyi phosphatidylethanolamine (DMPE), dipalmitoyl phosphatidylethanolamine (DPPE), palmitoyloleoyl phosphatidylethanolamine (POPE), lysophosphatidylethanolamine or a combination thereof. In one embodiment, the neutral phospholipid is selected from the group consisting of distearoylphosphatidylcholine (DSPC) and/or dimyristoyi phosphatidyl ethanolamine (DMPE).

[1656] Included in the instant disclosure is a free form of any lipid disclosed herein, as well as a pharmaceutically acceptable salt and stereoisomer thereof. Some of the isolated specific cationic lipids exemplified herein are the protonated salts of amine cationic lipids. The encompassed pharmaceutically acceptable salts not only include the isolated salts exemplified for the specific lipids described herein, but also all the typical pharmaceutically acceptable salts of the free form of any lipid disclosed herein.

[1657] The pharmaceutically acceptable salts of the instant lipids can be synthesized from the lipids of this invention which contain a basic or acidic moiety by conventional chemical methods. Generally, the salts of the basic cationic lipids are prepared either by ion exchange chromatography or by reacting the free base with stoichiometric amounts or with an excess of the desired salt-forming inorganic or organic acid in a suitable solvent or various combinations of solvents. Similarly, the salts of the acidic compounds are formed by reactions with the appropriate inorganic or organic base.

[1658] Thus, pharmaceutically acceptable salts of the lipids of this disclosure include the conventional non-toxic salts of the lipids of this invention as formed by reacting a basic instant lipids with an inorganic or organic acid. For example, conventional non-toxic salts include those derived from inorganic acids such as hydrochloric, hydrobromic, sulfuric, sulfamic, phosphoric, nitric and the like, as well as salts prepared from organic acids such as acetic, propionic, succinic, glycolic, stearic, lactic, malic, tartaric, citric, ascorbic, pamoic, maleic, hydroxymaleic, phenylacetic, glutamic, benzoic, salicylic, sulfanilic, 2-acetoxy-benzoic, fumaric, toluenesulfonic, methanesulfonic, ethane disulfonic, oxalic, isethionic, trifluoroacetic (TFA) and the like.

[1659] When the lipids of the present disclosure are acidic, suitable “pharmaceutically acceptable salts” refers to salts prepared form pharmaceutically acceptable non-toxic bases including inorganic bases and organic bases. Salts derived from inorganic bases include aluminum, ammonium, calcium, copper, ferric, ferrous, lithium, magnesium, manganic salts, manganous, potassium, sodium, zinc and the like. Non-limiting examples include ammonium, calcium, magnesium, potassium and sodium salts. Salts derived from pharmaceutically acceptable organic non-toxic bases include salts of primary, secondary and tertiary amines, substituted amines including naturally occurring substituted amines, cyclic amines and basic ion exchange resins, such as arginine, betaine caffeine, choline, N,N¹-dibenzylethylenediamine, diethylamin, 2-diethylaminoethanol, 2-dimethylaminoethanol, ethanolamine, ethylenediamine, N-ethylmorpholine, N-ethylpiperidine, glucamine, glucosamine, histidine, hydrabamine, isopropylamine, lysine, methyl glucamine, morpholine, piperazine, piperidine, polyamine resins, procaine, purines, theobromine, triethylamine, trimethylamine tripropylamine, tromethamine and the like.

### Targeting Compound or Moiety

[1660] In some embodiments, the present disclosure pertains to compositions and methods related to a composition comprising: a biologically active agent; a lipid comprising a C₁₀-C₄₀ linear, saturated or partially unsaturated, aliphatic chain; and a targeting compound or moiety (targeting component). In some embodiments, the present disclosure pertains to compositions and methods related to a composition comprising: a biologically active agent; a lipid comprising a C₁₀-C₄₀ linear, saturated or partially unsaturated, aliphatic chain, optionally substituted with one or more C₁₋₄ aliphatic group; and a targeting compound or moiety.

[1661] In various embodiments, the composition for delivery of a biologically active agent comprises a biologically active agent; a lipid selected from: lauric acid, myristic acid, palmitic acid, stearic acid, oleic acid, linoleic acid, alpha-linolenic acid, gamma-linolenic acid, docosahexaenoic acid (cis-DHA), turbinaric acid and dilinoleyl; and a targeting compound or moiety.

[1662] In various embodiments, the targeting compound or moiety is selected from: an antibody, a sugar, an antigen, a small molecule, a peptide, and a cell penetrating peptide (CPP).

[1663] In some embodiments, a targeting compound or moiety is a structure capable of targeting a compound or composition to a particular cell or tissue or subset of cells or tissues. In some embodiments, a targeting moiety is designed to take advantage of cell- or tissue-specific expression of particular targets, receptors, proteins, or other subcellular components; In some embodiments, a targeting moiety is a ligand (e.g., a small molecule, antibody, peptide, protein, carbohydrate, aptamer, etc.) that targets a compound or a composition to a cell or tissue, and/or binds to a target, receptor, protein, or other subcellular component. In some embodiments, a targeting moiety targets a composition comprising a lipid and a biologically active agent to a muscle cell or tissue. In some embodiments, a targeting moiety comprises a compound that targets a muscle cell or tissue. In some embodiments, a targeting moiety comprises fetuin, epidermal growth factor, fibroblast growth factor, insulin, and/or dexamethasone, or a component or fragment or combination thereof. In some embodiments, a targeting moiety targets a composition comprising a lipid and a biologically active agent to a neuron or other cell or tissue in the neuromuscular system. In some embodiments, a targeting moiety comprises a rabies virus peptide (see Kumar et al. 2007 Nature 448: 39-43; and Hwang do et al. 2011 Biomaterials 32: 4968-4975). In some embodiments, a targeting moiety is a moiety capable of binding to a neurotransmitter transporter, a dopamine transporter, a serotonin transporter, or norepinephrine transporter, or alpha-synuclein, or a mRNA encoding any of these components (see U.S. Pat. No. 9,084,825). In some embodiments, a targeting moiety is a transferrin receptor ligand or alpha-transferrin antibody, thus reportedly making use of a transferrin receptor-mediated route across the vascular endothelium. Clark et al. 2015 Proc. Natl. Acad. Sci. USA 112: 12486-12491; Bien-Ly et al. 2014 J. Exp. Med. 211: 233-244; and Youn et al. 2014 Mol. Pharm. 11: 486-495. In some embodiments, a targeting moiety binds to an integrin. In some embodiments, a targeting moiety binds to alphaIIbeta3, e.g., on platelets. In some embodiments, a targeting moiety binds to a beta2 integrin, e.g., on a leukocyte. In some embodiments, a targeting moiety binds to an alphavbeta3, e.g., on a tumor cell. In some embodiments, a targeting moiety binds to a GPCR (G protein-coupled receptor) (see Hanyaloglu et al. 2008 Ann. Rev. Pharm. Tox. 48: 537-568). In some embodiments, a targeting moiety binds to a gastrin releasing peptide receptor, e.g., on a cancer cell (see Cornelio et al. 2007 Ann. Oncol. 18: 1457-1466). In some embodiments, a targeting moiety comprises a carbonic anhydrase inhibitor.

[1664] Antibody-targeted liposomes can be constructed using, for instance, liposomes that incorporate protein A (see, Renneisen, et al., J. Bio. Chem., 265:16337-16342 (1990) and Leonetti, et. al., Proc. Natl. Acad. Sci. (USA), 87:2448-2451 (1990). Other examples of antibody conjugation are disclosed in U.S. Pat. No. 6,027,726. Examples of targeting moieties can also include other proteins, specific to cellular components, including antigens associated with neoplasms or tumors. Proteins used as targeting moieties can be attached to the liposomes via covalent bonds (see, Heath, Covalent Attachment of Proteins to Liposomes, 149 Methods in Enzymology 111-119 (Academic Press, Inc. 1987)). Other targeting methods include the biotin-avidin system.

[1665] In various embodiments, the targeting compound or moiety increases the targeting of the composition comprising a biologically active agent to a particular cell or tissue. For example, it is reported that particular cells or tissues in the body comprise particular receptors or other structures which allow the selective uptake or particular compounds. For example, muscle cells reportedly readily uptake sugars. Thus, as a non-limiting example, if delivery to a muscle cell or tissue is desired, the composition for delivery of a biologically active agent can comprise a biologically active agent; a lipid selected from: lauric acid, myristic acid, palmitic acid, stearic acid, oleic acid, linoleic acid, alpha-linolenic acid, gamma-linolenic acid, docosahexaenoic acid (cis-DHA), turbinaric acid and dilinoleyl; and a targeting compound or moiety, wherein the targeting compound or moiety targets a muscle cell or tissue. Such a targeting compound or moiety can comprise, as a non-limiting example, a sugar, e.g., a glucosamine (e.g., a trinary glucosamine or mono glucosamine) or mannose (e.g., a mono mannose). In various embodiments of the composition, the lipid and/or the targeting compound or moiety is conjugated to the biologically active agent. As a non-limiting example, if the biologically active agent is a nucleic acid, the nucleic acid can comprise a lipid and a targeting compound or moiety, e.g., a sugar. As a non-limiting example, if the biologically active agent is a nucleic acid, the nucleic acid can be conjugated to a lipid and/or targeting compound or moiety, e.g., a sugar. As a non-limiting example, if the biologically active agent is a nucleic acid, the nucleic acid can be conjugated on one end (e.g., the 5′ or 3′ end) to a lipid, and conjugated at the other end (e.g., the other of the 5′ or 3′ end) to a targeting compound or moiety, e.g., a sugar, e.g., a glucosamine (e.g., a trinary or mono glucosamine) or mannose (e.g., a mono mannose). In some embodiments, a targeting compound or moiety or component comprises a carbonic anhydrase inhibitor.

Optional 5′ and 3′ End Modifications for Biologically Active Agents which are Nucleic Acids

[1666] In some embodiments, the present disclosure pertains to a composition comprising a lipid and a biologically active agent, wherein the biologically active agent comprises or consists of a nucleic acid (e.g., an oligonucleotide). In some embodiments, a nucleic acid can further comprise a 5′ end or 3′ end cap (also referenced as a “modification”), which is non-nucleotidic. By describing a 5′ end cap or 3′ end cap as “non-nucleotidic”, it is meant that a nucleotide comprises three components: a phosphate, a pentose (e.g., a ribose or deoxyribose) and a nucleobase, and a 3′ end cap does not comprise all three of the components.

[1667] The 5′ end cap can be selected, as non-limiting examples, from any of: a composition comprising GalNAc; a nucleotide lacking a 5′ phosphate or 5′-OH; a nucleotide lacking a 5′ phosphate or a 5′-OH and also comprising a 2-OMe or 2′-MOE modification; 5′-deoxy-2′-O-methyl modification; 5′-OME-dT; ddT; and 5′-OTr-dT. Any 5′ end cap known in the art can be used on a CpG oligonucleotide.

[1668] The 3′ end cap can be selected, as non-limiting examples, from any of: C3, C6, C8, C10, C12, lithocholic acid, biphenyl, triethylene glycol, cyclohexyl, phenyl, adamantane, C3 amino, C7 amino, X027, X038, X050 to 52, X058 to 69, X097 to 98, X109 to 113, X1009 to 1028, and X1047 to 1049. See, for example, U.S. Pat. Nos. 8,084,600; 8,404,832; 8,404,831; 8,957,041; and WO 2015051366.

[1669] Any 3′ end cap known in the art can be used on a CpG oligonucleotide.

[1670] Any 5′ end cap can be used in combination with any 3′ end cap.

[1671] In various embodiments, the present disclosure pertains to a composition comprising a lipid and a biologically active agent, wherein the biologically active agent is a nucleic acid, and the nucleic acid comprises a 5′ end cap; a 3′ end cap; a 5′ end cap and a 3′ end cap; or neither a 5′ nor a 3′ end cap.

### Methods of Making a Composition Comprising a Lipid and a Biologically Active Agent

[1672] In some embodiments, the present disclosure pertains to compositions and methods related to a composition comprising a biologically active agent and a lipid comprising a C₁₀-C₄₀ linear, saturated or partially unsaturated, aliphatic chain, wherein the lipid is conjugated to the biologically active agent. In some embodiments, the present disclosure pertains to compositions and methods related to a composition comprising a biologically active agent and a lipid comprising a C₁₀-C₄₀ linear, saturated or partially unsaturated, aliphatic chain, optionally substituted with one or more C₁₋₄ aliphatic group, wherein the lipid is conjugated to the biologically active agent.

[1673] In some embodiments, the present disclosure pertains to compositions and methods related to a composition comprising a biologically active agent and a lipid comprising a C₁₀-C₄₀ linear, saturated or partially unsaturated, aliphatic chain, wherein the lipid is not conjugated to the biologically active agent. In some embodiments, the present disclosure pertains to compositions and methods related to a composition comprising a biologically active agent and a lipid comprising a C₁₀-C₄₀ linear, saturated or partially unsaturated, aliphatic chain, optionally substituted with one or more C₁₋₄ aliphatic group, wherein the lipid is not conjugated to the biologically active agent.

[1674] In some embodiments, a composition comprises a biologically active agent and a lipid selected from: lauric acid, myristic acid, palmitic acid, stearic acid, oleic acid, linoleic acid, alpha-linolenic acid, gamma-linolenic acid, docosahexaenoic acid (cis-DHA), turbinaric acid and dilinoleyl, wherein the lipid is not conjugated to the biologically active agent.

[1675] In some embodiments, a composition comprises a biologically active agent and a lipid selected from: lauric acid, myristic acid, palmitic acid, stearic acid, oleic acid, linoleic acid, alpha-linolenic acid, gamma-linolenic acid, docosahexaenoic acid (cis-DHA), turbinaric acid and dilinoleyl, wherein the lipid is conjugated to the biologically active agent.

[1676] In some embodiments, a composition comprises a biologically active agent and a lipid selected from: lauric acid, myristic acid, palmitic acid, stearic acid, oleic acid, linoleic acid, alpha-linolenic acid, gamma-linolenic acid, docosahexaenoic acid (cis-DHA), turbinaric acid and dilinoleyl, wherein the lipid is directly conjugated to the biologically active agent (without a linker interposed between the lipid and the biologically active agent).

[1677] In some embodiments, a composition comprises a biologically active agent and a lipid selected from: lauric acid, myristic acid, palmitic acid, stearic acid, oleic acid, linoleic acid, alpha-linolenic acid, gamma-linolenic acid, docosahexaenoic acid (cis-DHA), turbinaric acid and dilinoleyl, wherein the lipid is indirectly conjugated to the biologically active agent (with a linker interposed between the lipid and the biologically active agent).

[1678] Various methods of making compositions comprising lipids are known in the art.

[1679] Various methods of conjugating a lipid to various molecules are known in the art.

[1680] A non-limiting example of a method for conjugating a lipid to an oligonucleotide is provided in Example 2. Similar methods can be used to conjugate stereorandom and stereopure oligonucleotides to various lipids.

[1681] Any appropriate method known in the art can be used to produce a composition comprising a lipid and a biologically active agent as described herein.

### Linkers

[1682] In some embodiments, the present disclosure pertains to compositions and methods related to a composition comprising a biologically active agent and a lipid comprising a C₁₀-C₄₀ linear, saturated or partially unsaturated, aliphatic chain, wherein the lipid is conjugated to the biologically active agent. In some embodiments, the present disclosure pertains to compositions and methods related to a composition comprising a biologically active agent and a lipid comprising a C₁₀-C₄₀ linear, saturated or partially unsaturated, aliphatic chain, optionally substituted with one or more C₁₋₄ aliphatic group, wherein the lipid is conjugated to the biologically active agent.

[1683] In some embodiments, the present disclosure pertains to compositions and methods related to a composition comprising a biologically active agent and a lipid comprising a C₁₀-C₄₀ linear, saturated or partially unsaturated, aliphatic chain, wherein the lipid is not conjugated to the biologically active agent. In some embodiments, the present disclosure pertains to compositions and methods related to a composition comprising a biologically active agent and a lipid comprising a C₁₀-C₄₀ linear, saturated or partially unsaturated, aliphatic chain, optionally substituted with one or more C₁₋₄ aliphatic group, wherein the lipid is not conjugated to the biologically active agent.

[1684] In some embodiments, a composition comprises a biologically active agent and a lipid selected from: lauric acid, myristic acid, palmitic acid, stearic acid, oleic acid, linoleic acid, alpha-linolenic acid, gamma-linolenic acid, docosahexaenoic acid (cis-DHA), turbinaric acid and dilinoleyl, wherein the lipid is not conjugated to the biologically active agent.

[1685] In some embodiments, a composition comprises a biologically active agent and a lipid selected from: lauric acid, myristic acid, palmitic acid, stearic acid, oleic acid, linoleic acid, alpha-linolenic acid, gamma-linolenic acid, docosahexaenoic acid (cis-DHA), turbinaric acid and dilinoleyl, wherein the lipid is conjugated to the biologically active agent.

[1686] In some embodiments, a composition comprises a biologically active agent and a lipid selected from: lauric acid, myristic acid, palmitic acid, stearic acid, oleic acid, linoleic acid, alpha-linolenic acid, gamma-linolenic acid, docosahexaenoic acid (cis-DHA), turbinaric acid and dilinoleyl, wherein the lipid is directly conjugated to the biologically active agent (without a linker interposed between the lipid and the biologically active agent).

[1687] In some embodiments, a composition comprises a biologically active agent and a lipid selected from: lauric acid, myristic acid, palmitic acid, stearic acid, oleic acid, linoleic acid, alpha-linolenic acid, gamma-linolenic acid, docosahexaenoic acid (cis-DHA), turbinaric acid and dilinoleyl, wherein the lipid is indirectly conjugated to the biologically active agent (with a linker interposed between the lipid and the biologically active agent).

[1688] A linker is a moiety that connects two parts of a composition; as a non-limiting example, a linker physically connects a biologically active agent to a lipid. In some embodiments, a linker is -L^{LD}-.

[1689] Non-limiting examples of suitable linkers include: an uncharged linker; a charged linker; a linker comprising an alkyl; a linker comprising a phosphate; a branched linker; an unbranched linker; a linker comprising at least one cleavage group; a linker comprising at least one redox cleavage group; a linker comprising at least one phosphate-based cleavage group; a linker comprising at least one acid-cleavage group; a linker comprising at least one ester-based cleavage group; a linker comprising at least one peptide-based cleavage group.

[1690] In some embodiments, a linker comprises an uncharged linker or a charged linker.

[1691] In some embodiments, a linker comprises an alkyl.

[1692] In some embodiments, a linker comprises a phosphate. In various embodiments, a phosphate can also be modified by replacement of a bridging oxygen, (i.e. oxygen that links the phosphate to the nucleoside), with nitrogen (bridged phosphoroamidates), sulfur (bridged phosphorothioates) and carbon (bridged methylenephosphonates). The replacement can occur at the either linking oxygen or at both the linking oxygens. In some embodiments, the bridging oxygen is the 3′-oxygen of a nucleoside, replacement with carbon is done. In some embodiments, the bridging oxygen is the 5′-oxygen of a nucleoside, replacement with nitrogen is done. In various embodiments, the linker comprising a phosphate comprises any one or more of: a phosphorodithioate, phosphoramidate, boranophosphonoate, or a compound of formula (I):

[chemical structure]

where R³ is selected from OH, SH, NH₂, BH₃, CH₃, C₁₋₆ alkyl, C₆₋₁₀ aryl, C₁₋₆ alkoxy and C₆₋₁₀ aryl-oxy, wherein C₁₋₆ alkyl and C₆₋₁₀ aryl are unsubstituted or optionally independently substituted with 1 to 3 groups independently selected from halo, hydroxyl and NH₂; and R⁴ is selected from O, S, NH, or CH₂.

[1693] In some embodiments, a linker comprises a direct bond or an atom such as oxygen or sulfur, a unit such as NR¹, C(O), C(O)NH, SO, SO₂, SO₂NH or a chain of atoms, such as substituted or unsubstituted alkyl, substituted or unsubstituted alkenyl, substituted or unsubstituted alkynyl, arylalkyl, arylalkenyl, arylalkynyl, heteroarylalkyl, heteroarylalkenyl, heteroarylalkynyl, heterocyclylalkyl, heterocyclylalkenyl, heterocyclylalkynyl, aryl, heteroaryl, heterocyclyl, cycloalkyl, cycloalkenyl, alkylarylalkyl, alkylarylalkenyl, alkylarylalkynyl, alkenylarylalkyl, alkenylarylalkenyl, alkenylarylalkynyl, alkynylarylalkyl, alkynylarylalkenyl, alkynylarylalkynyl, alkylheteroarylalkyl, alkylheteroarylalkenyl, alkylheteroarylalkynyl, alkenylheteroarylalkyl, alkenylheteroarylalkenyl, alkenylheteroarylalkynyl, alkynylheteroarylalkyl, alkynylheteroarylalkenyl, alkynylheteroarylalkynyl, alkylheterocyclylalkyl, alkylheterocyclylalkenyl, alkylhererocyclylalkynyl, alkenylheterocyclylalkyl, alkenylheterocyclylalkenyl, alkenylheterocyclylalkynyl, alkynylheterocyclylalkyl, alkynylheterocyclylalkenyl, alkynylheterocyclylalkynyl, alkylaryl, alkenylaryl, alkynylaryl, alkylheteroaryl, alkenylheteroaryl, alkynylhereroaryl, where one or more methylenes can be interrupted or terminated by O, S, S(O), SO₂, N(R₁)₂, C(O), cleavable linking group, substituted or unsubstituted aryl, substituted or unsubstituted heteroaryl, substituted or unsubstituted heterocyclic; where R¹ is hydrogen, acyl, aliphatic or substituted aliphatic.

[1694] In some embodiments, a linker is a branched linker. In some embodiments, a branchpoint of the branched linker may be at least trivalent, but may be a tetravalent, pentavalent or hexavalent atom, or a group presenting such multiple valencies. In some embodiments, a branchpoint is —N, —N(Q)-C, —O—C, —S—C, —SS—C, —C(O)N(Q)-C, —OC(O)N(Q)-C, —N(Q)C(O)—C, or —N(Q)C(O)O—C; wherein Q is independently for each occurrence H or optionally substituted alkyl. In other embodiment, the branchpoint is glycerol or glycerol derivative.

[1695] In one embodiment, a linker comprises at least one cleavable linking group.

[1696] As a non-limiting example, a cleavable linking group can be sufficiently stable outside the cell, but which upon entry into a target cell is cleaved to release the two parts the linker is holding together. As a non-limiting example, a cleavable linking group is cleaved at least 10 times or more, at least 100 times faster in the target cell or under a first reference condition (which can, e.g., be selected to mimic or represent intracellular conditions) than in the blood of a subject, or under a second reference condition (which can, e.g., be selected to mimic or represent conditions found in the blood or serum). Cleavable linking groups are susceptible to cleavage agents, e.g., pH, redox potential or the presence of degradative molecules. Generally, cleavage agents are more prevalent or found at higher levels or activities inside cells than in serum or blood. Examples of such degradative agents include: redox agents which are selected for particular substrates or which have no substrate specificity, including, e.g., oxidative or reductive enzymes or reductive agents such as mercaptans, present in cells, that can degrade a redox cleavable linking group by reduction; esterases; endosomes or agents that can create an acidic environment, e.g., those that result in a pH of five or lower; enzymes that can hydrolyze or degrade an acid cleavable linking group by acting as a general acid, peptidases (which can be substrate specific), and phosphatases.

[1697] As a non-limiting example, a cleavable linkage group, such as a disulfide bond can be susceptible to pH. The pH of human serum is 7.4, while the average intracellular pH is slightly lower, ranging from about 7.1-7.3. Endosomes have a more acidic pH, in the range of 5.5-6.0, and lysosomes have an even more acidic pH at around 5.0. Some linkers will have a cleavable linking group that is cleaved at a desired pH, thereby releasing the cationic lipid from the ligand inside the cell, or into the desired compartment of the cell.

[1698] As a non-limiting example, a linker can include a cleavable linking group that is cleavable by a particular enzyme. The type of cleavable linking group incorporated into a linker can depend on the cell to be targeted. For example, liver targeting ligands can be linked to the cationic lipids through a linker that includes an ester group. Liver cells are rich in esterases, and therefore the linker will be cleaved more efficiently in liver cells than in cell types that are not esterase-rich. Other cell-types rich in esterases include cells of the lung, renal cortex, and testis.

[1699] As a non-limiting example, a linker can contain a peptide bond, which can be used when targeting cell types rich in peptidases, such as liver cells and synoviocytes.

[1700] As a non-limiting example, suitability of a candidate cleavable linking group can be evaluated by testing the ability of a degradative agent (or condition) to cleave the candidate linking group. It will also be desirable to also test the candidate cleavable linking group for the ability to resist cleavage in the blood or when in contact with other non-target tissue. Thus one can determine the relative susceptibility to cleavage between a first and a second condition, where the first is selected to be indicative of cleavage in a target cell and the second is selected to be indicative of cleavage in other tissues or biological fluids, e.g., blood or serum. The evaluations can be carried out in cell free systems, in cells, in cell culture, in organ or tissue culture, or in whole animals. It may be useful to make initial evaluations in cell-free or culture conditions and to confirm by further evaluations in whole animals. As a non-limiting example, useful candidate compounds are cleaved at least 2, 4, 10 or 100 times faster in the cell (or under in vitro conditions selected to mimic intracellular conditions) as compared to blood or serum (or under in vitro conditions selected to mimic extracellular conditions).

[1701] In some embodiments, a linker comprises a redox cleavable linking group. As a non-limiting example, one class of cleavable linking groups are redox cleavable linking groups that are cleaved upon reduction or oxidation. A non-limiting example of reductively cleavable linking group is a disulphide linking group (—S—S—). To determine if a candidate cleavable linking group is a suitable “reductively cleavable linking group,” or for example is suitable for use with a particular oligonucleotide moiety and particular targeting agent one can look to methods described herein. As a non-limiting example, a candidate can be evaluated by incubation with dithiothreitol (DTT), or other reducing agent using reagents know in the art, which mimic the rate of cleavage which would be observed in a cell, e.g., a target cell. The candidates can also be evaluated under conditions which are selected to mimic blood or serum conditions. As a non-limiting example, candidate compounds are cleaved by at most 10% in the blood. As a non-limiting example, useful candidate compounds are degraded at least 2, 4, 10 or 100 times faster in the cell (or under in vitro conditions selected to mimic intracellular conditions) as compared to blood (or under in vitro conditions selected to mimic extracellular conditions). The rate of cleavage of candidate compounds can be determined using standard enzyme kinetics assays under conditions chosen to mimic intracellular media and compared to conditions chosen to mimic extracellular media.

[1702] In some embodiments, a linker comprises a phosphate-based cleavable linking groups are cleaved by agents that degrade or hydrolyze the phosphate group. An example of an agent that cleaves phosphate groups in cells are enzymes such as phosphatases in cells. Examples of phosphate-based linking groups are —O—P(O)(ORk)-O—, —O—P(S)(ORk)-O—, —O—P(S)(SRk)-O—, —S—P(O)(ORk)-O—, —O—P(O)(ORk)-S—, —S—P(O)(ORk)-S—, —O—P(S)(ORk)-S—, —S—P(S)(ORk)-O—, —O—P(O)(Rk)-O—, —O—P(S)(Rk)-O—, —S—P(O)(Rk)-O—, —S—P(S)(Rk)-O—, —S—P(O)(Rk)-S—, —O—P(S)(Rk)-S—. Additional non-limiting examples are —O—P(O)(OH)—O—, —O—P(S)(OH)—O—, —O—P(S)(SH)—O—, —S—P(O)(OH)—O—, —O—P(O)(OH)—S—, —S—P(O)(OH)—S—, —O—P(S)(OH)—S—, —S—P(S)(OH)—O—, —O—P(O)(H)—O—, —O—P(S)(H)—O—, —S—P(O)(H)—O—, —S—P(S)(H)—O—, —S—P(O)(H)—S—, —O—P(S)(H)—S—. An additional non-limiting examples is —O—P(O)(OH)—O—. In various embodiments, Rk is any of: OH, SH, NH₂, BH₃, CH₃, C₁₋₆ alkyl, C₆₋₁₀ aryl, C₁₋₆ alkoxy and C₆₋₁₀ aryl-oxy, wherein C₁₋₆ alkyl and C₆₋₁₀ aryl are unsubstituted or optionally independently substituted with 1 to 3 groups independently selected from halo, hydroxyl and NH₂; and R⁴ is selected from O, S, NH, or CH₂.

[1703] In some embodiments, a linker comprises an acid cleavable linking groups are linking groups that are cleaved under acidic conditions. As a non-limiting example, acid cleavable linking groups are cleaved in an acidic environment with a pH of about 6.5 or lower (e.g., about 6.0, 5.5, 5.0, or lower), or by agents such as enzymes that can act as a general acid. In a cell, specific low pH organelles, such as endosomes and lysosomes can provide a cleaving environment for acid cleavable linking groups. Examples of acid cleavable linking groups include but are not limited to hydrazones, esters, and esters of amino acids. Acid cleavable groups can have the general formula —C═NN—, C(O)O, or —OC(O). In an additional non-limiting example, when the carbon attached to the oxygen of the ester (the alkoxy group) is an aryl group, substituted alkyl group, or tertiary alkyl group such as dimethyl pentyl or t-butyl.

[1704] In some embodiments, a linker comprises an ester-based linking groups. As a non-limiting example, ester-based cleavable linking groups are cleaved by enzymes such as esterases and amidases in cells. Examples of ester-based cleavable linking groups include but are not limited to esters of alkylene, alkenylene and alkynylene groups. Ester cleavable linking groups have the general formula —C(O)O—, or —OC(O)—. These candidates can be evaluated using methods analogous to those described above.

[1705] In some embodiments, a linker comprises a peptide-based cleaving group. Peptide-based cleavable linking groups are cleaved by enzymes such as peptidases and proteases in cells. Peptide-based cleavable linking groups are peptide bonds formed between amino acids to yield oligopeptides (e.g., dipeptides, tripeptides etc.) and polypeptides. As a non-limiting example, peptide-based cleavable groups do not include the amide group (—C(O)NH—). The amide group can be formed between any alkylene, alkenylene or alkynylene. A peptide bond is a special type of amide bond formed between amino acids to yield peptides and proteins. As a non-limiting example, a peptide based cleavage group can be limited to the peptide bond (i.e., the amide bond) formed between amino acids yielding peptides and proteins and does not include the entire amide functional group. As a non-limiting example, a peptide-based cleavable linking groups can have the general formula —NHCHR^{A}C(O)NHCHR^{B}C(O)—, where R^{A} and R^{B} are the R groups of the two adjacent amino acids. These candidates can be evaluated using methods analogous to those described above.

[1706] Any linker reported in the art can be used, including, as non-limiting examples, those described in: U.S. Pat. App. No. 20150265708.

[1707] In some embodiments, a lipid is conjugated to a biologically active agent using any method known in the art in accordance with the present disclosure.

[1708] Non-limiting examples of procedures for conjugating a lipid to a biologically active agent are provided in the Examples. For example, a lipid (e.g., stearic acid or turbinaric acid) can be conjugated to an oligonucleotide (e.g., WV-3473) using a C6 PO linker to produced WV-3545, 5′-Mod015L001fU*fC*fA*fA*fG*fG*mAfA*mGmA*fU*mGmGfC*fA*fU*fU*fU*fC*fU-3′ (SEQ ID NO: 2419), wherein Mod015L001 is based on stearic acid and C6 PO linker; and WV-3546, 5′-Mod020L001fU*fC*fA*fA*fG*fG*mAfA*mGmA*fU*mGmGfC*fA*fU*fU*fU*fC*fU-3′ (SEQ ID NO: 2420), wherein Mod020L001 is based on turbinaric acid and C6 PO linker; WV-3856, 5′-Mod015L001fU*fC*fA*fA*fG*fG*mAfA*mGfA*mUfG*mGfC*fA*fU*fU*fU*fC*fU-3′ (SEQ ID NO: 2421), wherein Mod015L001 is based on stearic acid and C6 PO linker; and WV-3559, 5′-Mod020L001fU*fC*fA*fA*fG*fG*mAfA*mGfA*mUfG*mGfC*fA*fU*fU*fU*fC*fU-3′ (SEQ ID NO: 2422), wherein Mod020L001 is based on turbinaric acid and C6 PO linker. These oligonucleotides were efficacious in various in vitro assays.

### Pharmaceutical Preparations

[1709] A pharmaceutical composition can comprise a lipid and a biologically active agent.

[1710] In various embodiments, the present disclosure pertains to a composition or pharmaceutical composition comprising a lipid and a biologically active agent and a pharmaceutically acceptable carrier.

[1711] In some embodiments, pharmaceutical compositions may be specially formulated for administration in solid or liquid form, including those adapted for the following: oral administration, for example, drenches (aqueous or non-aqueous solutions or suspensions), tablets, e.g., those targeted for buccal, sublingual, and systemic absorption, boluses, powders, granules, pastes for application to the tongue; parenteral administration, for example, by subcutaneous, intramuscular, intravenous or epidural injection as, for example, a sterile solution or suspension, or sustained-release formulation; topical application, for example, as a cream, ointment, or a controlled-release patch or spray applied to the skin, lungs, or oral cavity; intravaginally or intrarectally, for example, as a pessary, cream, or foam; sublingually; ocularly; transdermally; or nasally, pulmonary, and to other mucosal surfaces. A pharmaceutical composition comprising a lipid and a biologically active agent can be delivered by intravenous infusion, subcutaneous injection, intramuscular injection, intranasal, intrathecal, topical, mucosal delivery, vaginal delivery, oral delivery, intrarectal delivery, conjunctival delivery, intraocular delivery, transcutaneous delivery, or any other modality known in the art.

[1712] This pharmaceutical composition can further comprise any component appropriate for delivery of a composition comprising a lipid and a biologically active agent. Such components include, as non-limiting examples, a pharmaceutically acceptable salt, a pharmaceutically accept carrier.

[1713] Pharmaceutically acceptable salts are well known in the art. For example, S. M. Berge, et al. describes pharmaceutically acceptable salts in detail in J. Pharmaceutical Sciences, 66: 1-19 (1977). In some embodiments, pharmaceutically acceptable salt include, but are not limited to, nontoxic acid addition salts, which are salts of an amino group formed with inorganic acids such as hydrochloric acid, hydrobromic acid, phosphoric acid, sulfuric acid and perchloric acid or with organic acids such as acetic acid, maleic acid, tartaric acid, citric acid, succinic acid or malonic acid or by using other methods used in the art such as ion exchange. In some embodiments, pharmaceutically acceptable salts include, but are not limited to, adipate, alginate, ascorbate, aspartate, benzenesulfonate, benzoate, bisulfate, borate, butyrate, camphorate, camphorsulfonate, citrate, cyclopentanepropionate, digluconate, dodecylsulfate, ethanesulfonate, formate, fumarate, glucoheptonate, glycerophosphate, gluconate, hemisulfate, heptanoate, hexanoate, hydroiodide, 2-hydroxy-ethanesulfonate, lactobionate, lactate, laurate, lauryl sulfate, malate, maleate, malonate, methanesulfonate, 2-naphthalenesulfonate, nicotinate, nitrate, oleate, oxalate, palmitate, pamoate, pectinate, persulfate, 3-phenylpropionate, phosphate, picrate, pivalate, propionate, stearate, succinate, sulfate, tartrate, thiocyanate, p-toluenesulfonate, undecanoate, valerate salts, and the like. Representative alkali or alkaline earth metal salts include sodium, lithium, potassium, calcium, magnesium, and the like. In some embodiments, pharmaceutically acceptable salts include, when appropriate, nontoxic ammonium, quaternary ammonium, and amine cations formed using counterions such as halide, hydroxide, carboxylate, sulfate, phosphate, nitrate, alkyl having from 1 to 6 carbon atoms, sulfonate and aryl sulfonate.

[1714] Pharmaceutically acceptable carriers are well known in the art. For example, acceptable carriers (e.g., pharmaceutically acceptable carriers), diluents, stabilizers, buffers, preservatives, etc., may be included as described infra.

[1715] As used herein, the term “pharmaceutically acceptable carrier” means a pharmaceutically-acceptable material, composition or vehicle, such as a liquid or solid filler, diluent, excipient, or solvent encapsulating material, involved in carrying or transporting the subject compound from one organ, or portion of the body, to another organ, or portion of the body. Each carrier must be “acceptable” in the sense of being compatible with the other ingredients of the formulation and not injurious to the patient. Some examples of materials which can serve as pharmaceutically-acceptable carriers include: sugars, such as lactose, glucose and sucrose; starches, such as corn starch and potato starch; cellulose, and its derivatives, such as sodium carboxymethyl cellulose, ethyl cellulose and cellulose acetate; powdered tragacanth; malt; gelatin; talc; excipients, such as cocoa butter and suppository waxes; oils, such as peanut oil, cottonseed oil, safflower oil, sesame oil, olive oil, corn oil and soybean oil; glycols, such as propylene glycol; polyols, such as glycerin, sorbitol, mannitol and polyethylene glycol; esters, such as ethyl oleate and ethyl laurate; agar; buffering agents, such as magnesium hydroxide and aluminum hydroxide; alginic acid; pyrogen-free water; isotonic saline; Ringer's solution; ethyl alcohol; pH buffered solutions; polyesters, polycarbonates and/or polyanhydrides; and other non-toxic compatible substances employed in pharmaceutical formulations.

[1716] Pharmaceutically acceptable carriers or excipients that can be used in the manufacture of a pharmaceutical composition include, but are not limited to: binding agents, buffering agents, disintegrating agents, dispersing and/or granulating agents, inert diluents, lubricating agents, oils, preservatives, surface active agents and/or emulsifiers. Such excipients may optionally be included in pharmaceutical compositions.

[1717] Non-limiting example diluents include, but are not limited to: calcium carbonate, calcium hydrogen phosphate, calcium phosphate, calcium sulfate, cellulose, cornstarch, dicalcium phosphate, dry starch, inositol, kaolin, mannitol, microcrystalline cellulose, powdered sugar, sodium carbonate, sodium chloride, sodium phosphate lactose, sorbitol, sucrose, and/or combinations thereof.

[1718] Non-limiting example granulating and/or dispersing agents include, but are not limited to: agar, alginic acid, bentonite, calcium carbonate, calcium carboxymethyl cellulose, carboxymethyl cellulose, cation-exchange resins, cellulose and wood products, citrus pulp, clays, corn starch, cross-linked poly(vinyl-pyrrolidone) (crospovidone), cross-linked sodium carboxymethyl cellulose (e.g., croscarmellose), guar gum, magnesium aluminum silicate (e.g., VEEGUM®), methylcellulose, microcrystalline starch, natural sponge, potato starch, pregelatinized starch (e.g., starch 1500), quaternary ammonium compounds, silicates, sodium carbonate, sodium carboxymethyl starch (sodium starch glycolate), sodium lauryl sulfate, sodium starch glycolate, tapioca starch, water insoluble starch, and/or combinations thereof.

[1719] Non-limiting example surface active agents and/or emulsifiers include, but are not limited to: polyoxyethylene lauryl ether [BRIJ® 30], acacia, acrylic acid polymer, agar, alginic acid, and carboxyvinyl polymer, and propylene glycol monostearate, and SOLUTOL®), benzalkonium chloride, carbomers, carboxy polymethylene, carboxymethylcellulose sodium, carrageenan, casein, cellulosic derivatives, cetrimonium bromide, cetyl alcohol, cetylpyridinium chloride, cholesterol, cholesterol, chondrux, colloidal clays (e.g. bentonite[aluminum silicate] and VEEGUM® [magnesium aluminum silicate]), diethylene glycol monolaurate, docusate sodium, egg yolk, ethyl laurate, ethyl oleate, ethylene glycol distearate, gelatin, glyceryl monooleate, glyceryl monostearate, high molecular weight alcohols, stearyl alcohol, hydroxymethyl cellulose, hydroxypropyl cellulose, hydroxypropyl methylcellulose, lecithin, long chain amino acid derivatives, methylcellulose, natural emulsifiers, oleic acid, oleyl alcohol, pectin, PLUORINC®F 68, POLOXAMER® 188, poly(vinyl-pyrrolidone), polyacrylic acid, polyethoxylated castor oil, polyethylene glycol fatty acid esters (e.g., CREMOPHOR®), polyoxyethylene esters (e.g. polyoxyethylene monostearate [MYRJ®45], polyoxyethylene ethers, polyoxyethylene hydrogenated castor oil, polyoxyethylene sorbitan [TWEENn®60], polyoxyethylene sorbitan monooleate [TWEEN®80], polyoxymethylene stearate, polyvinyl alcohol), potassium oleate, powdered cellulose, sodium alginate, sodium lauryl sulfate, sodium oleate, sorbitan fatty acid esters (e.g. polyoxyethylene sorbitan monolaurate [TWEEN®20], sorbitan monooleate [SPAN®80]), sorbitan monopalmitate [SPAN®40], sorbitan monostearate [SPAN®60], sorbitan tristearate [SPAN®65], sucrose fatty acid esters, tragacanth, triacetin monostearate, triethanolamine oleate, wax, wool fat, xanthan, and/or combinations thereof.

[1720] Non-limiting example binding agents include, but are not limited to: starch (e.g. cornstarch and starch paste); gelatin; sugars (e.g. sucrose, glucose, dextrose, dextrin, molasses, lactose, lactitol, mannitol); natural and synthetic gums (e.g. acacia, sodium alginate, extract of Irish moss, panwar gum, ghatti gum, mucilage of isapol husks, carboxymethylcellulose, methylcellulose, ethylcellulose, hydroxyethylcellulose, hydroxypropyl cellulose, hydroxypropyl methylcellulose, microcrystalline cellulose, cellulose acetate, poly(vinyl-pyrrolidone), magnesium aluminum silicate (Veegum®); and larch arabogalactan; alginates; polyethylene oxide; polyethylene glycol; inorganic calcium salts; silicic acid; polymethacrylates; waxes; water; alcohol; and combinations thereof.

[1721] Non-limiting example preservatives may include, but are not limited to: acidic preservatives, alcohol preservatives, antifungal preservatives, antimicrobial preservatives, antioxidants, chelating agents, and/or other preservatives.

[1722] Non-limiting example antioxidants include, but are not limited to: alpha tocopherol, ascorbic acid, ascorbyl palmitate, butylated hydroxyanisole, butylated hydroxytoluene, monothioglycerol, potassium metabisulfite, propionic acid, propyl gallate, sodium ascorbate, sodium bisulfite, sodium metabisulfite, and sodium sulfite.

[1723] Non-limiting example chelating agents include: citric acid monohydrate, dipotassium edetate, disodium edetate, edetic acid, ethylenediaminetetraacetic acid (EDTA), fumaric acid, malic acid, phosphoric acid, sodium edetate, tartaric acid, and trisodium edetate,

[1724] Non-limiting example antimicrobial preservatives include, but are not limited to: benzalkonium chloride, benzethonium chloride, benzyl alcohol, bronopol, cetrimide, cetylpyridinium chloride, chlorhexidine, chlorobutanol, chlorocresol, chloroxylenol, cresol, ethyl alcohol, glycerin, hexetidine, imidurea, phenol, phenoxyethanol, phenylethyl alcohol, phenylmercuric nitrate, propylene glycol, and thimerosal.

[1725] Non-limiting example antifungal preservatives include, but are not limited to: benzoic acid, butyl paraben, ethyl paraben, hydroxybenzoic acid, methyl paraben, potassium benzoate, potassium sorbate, propyl paraben, sodium benzoate, sodium propionate, and sorbic acid.

[1726] Non-limiting example alcohol preservatives include, but are not limited to, bisphenol, chlorobutanol, ethanol, hydroxybenzoate, phenol, phenolic compounds, phenylethyl alcohol, and polyethylene glycol.

[1727] Non-limiting example acidic preservatives include, but are not limited to, acetic acid, ascorbic acid, beta-carotene, citric acid, dehydroacetic acid, phytic acid, sorbic acid, vitamin A, vitamin C, vitamin E, Other preservatives include, but are not limited to, butylated hydroxyanisol (BHA), butylated hydroxytoluened (BHT), cetrimide, deteroxime mesylate, ethylenediamine, EUXYL®, GERMABEN®II, GERMALL® 115, GLYDANT PLUS®, KATHON™, methylparaben, NEOLONE™, PHENONIP®, potassium metabisulfite, potassium sulfite, sodium bisulfite, sodium lauryl ether sulfate (SLES), sodium lauryl sulfate (SLS), sodium metabisulfite, tocopherol acetate, and tocopherol.

[1728] Non-limiting example buffering agents include, but are not limited to: acetate buffer solutions, alginic acid, aluminum hydroxide, ammonium chloride, calcium carbonate, calcium chloride, calcium citrate, calcium glubionate, calcium gluceptate, calcium gluconate, calcium glycerophosphate, calcium hydroxide phosphate, calcium lactate, calcium levulinate, citrate buffer solutions, D-gluconic acid, dibasic calcium phosphate, dibasic potassium phosphate, dibasic sodium phosphate, ethyl alcohol, isotonic saline, magnesium hydroxide, monobasic potassium phosphate, monobasic sodium phosphate, pentanoic acid, phosphate buffer solutions, phosphoric acid, potassium acetate, potassium chloride, potassium gluconate, potassium mixtures, potassium phosphate mixtures, propanoic acid, pyrogen-free water, Ringer's solution, sodium acetate, sodium bicarbonate, sodium chloride, sodium citrate, sodium lactate, sodium phosphate mixtures, tribasic calcium phosphate, tromethamine, and/or combinations thereof.

[1729] Non-limiting example lubricating agents include, but are not limited to: calcium stearate, glyceryl behenate, hydrogenated vegetable oils, leucine, magnesium lauryl sulfate, magnesium stearate, malt, polyethylene glycol, silica, sodium acetate, sodium benzoate, sodium chloride, sodium lauryl sulfate, stearic acid, talc, and/or combinations thereof.

[1730] Non-limiting example oils include, but are not limited to: almond, apricot kernel, avocado, babassu, bergamot, black current seed, borage, cade, camomile, canola, caraway, carnauba, castor, cinnamon, cocoa butter, coconut, cod liver, coffee, corn, cotton seed, emu, eucalyptus, evening primrose, fish, flaxseed, geraniol, gourd, grape seed, hazel nut, hyssop, isopropyl myristate, jojoba, kukui nut, lavandin, lavender, lemon, litsea cubeba, macadamia nut, mallow, mango seed, meadowfoam seed, mink, nutmeg, olive, orange, orange roughy, palm, palm kernel, peach kernel, peanut, poppy seed, pumpkin seed, rapeseed, rice bran, rosemary, safflower, sandalwood, sasquana, savoury, sea buckthorn, sesame, shea butter, silicone, soybean, sunflower, tea tree, thistle, tsubaki, vetiver, walnut, and wheat germ oils.

[1731] Non-limiting example oils include, but are not limited to: butyl stearate, caprylic triglyceride, capric triglyceride, cyclomethicone, diethyl sebacate, dimethicone 360, isopropyl myristate, mineral oil, octyldodecanol, oleyl alcohol, silicone oil, and/or combinations thereof. Non-limiting example excipients include, but are not limited to: cocoa butter and suppository waxes, coloring agents, coating agents, sweetening, flavoring, and/or perfuming agents.

[1732] As a non-limiting example, in an in vitro experiment, the results of which are shown in FIG. 1, a composition comprising a biologically active agent and a lipid was delivered to cells in muscle cell proliferation medium. As a non-limiting example, in an in vivo experiment, the results of which are shown in FIGS. 2 to 6, a composition comprising a biologically active agent and a lipid was delivered to mice subcutaneously in PBS.

[1733] Any composition comprising a lipid and a biologically active disclosed herein can be used in any pharmaceutical composition described herein or otherwise known in the art.

### Methods of Delivery of a Pharmaceutical Composition Comprising a Lipid and a Biologically Active Agent

[1734] A pharmaceutical composition comprising a lipid and a biologically active agent can be delivered using any method or device or other modality known in the art, including, but not limited, to any method of administration described herein.

[1735] As a non-limiting example: A pharmaceutical composition comprising a lipid and a biologically active agent can be administered orally, topically, parenterally, by inhalation or spray, or rectally in dosage unit formulations containing conventional non-toxic pharmaceutically acceptable carriers, adjuvants and/or vehicles. The term parenteral as used herein includes percutaneous, subcutaneous, intravascular (e.g., intravenous), intramuscular, intraperitoneal, or intrathecal injection, or infusion techniques and the like. As another non-limiting example: A pharmaceutical composition comprising a lipid and a biologically active agent can be delivered by intravenous infusion, subcutaneous injection, intramuscular injection, intranasal, intrathecal, topical, mucosal delivery, vaginal delivery, oral delivery, intrarectal delivery, conjunctival delivery, intraocular delivery, transcutaneous delivery, or any other modality known in the art.

[1736] The pharmaceutical composition can comprise an therapeutically effective amount or dosage of a lipid and a biologically active agent.

[1737] Dosage levels of the order of from about 0.1 mg to about 140 mg per kilogram of body weight per day are useful in the treatment of the various conditions (about 0.5 mg to about 7 g per subject per day). The amount of active ingredient that can be combined with the carrier materials to produce a single dosage form varies depending upon the host treated and the particular mode of administration. Dosage unit forms generally contain between from about 1 mg to about 500 mg of an active ingredient. It is understood that the specific dose level for any particular subject depends upon a variety of factors including the activity of the specific compound employed, the age, body weight, general health, sex, diet, time of administration, route of administration, and rate of excretion, drug combination and the severity of the particular disease undergoing therapy.

[1738] Any composition comprising a lipid and a biologically active agent can be used in any pharmaceutical composition described herein or otherwise known in the art, and can be used with any method of delivery described herein or otherwise known in the art.

### Methods of Treatment

[1739] A composition comprising a lipid and a biologically active agent, as used herein, can be used to treat a subject in need thereof.

[1740] In various embodiments, the biologically active agent is active against a specific target gene or gene product (such as a RNA, protein or other gene product). In various embodiments, the biologically active agent is active against a specific target gene or gene product (such as a RNA, protein or other gene product), wherein the gene or gene product at least partially mediates and/or is associated with a particular disease or disorder (e.g., a target gene- or target gene or gene product-related disorder or disease). As a non-limiting example, if a biologically active agent is an antibody, the antibody can bind to a particular target gene product, and the target gene product at least partially mediates or is associated with a disorder or disease associated with the target gene or gene product.

[1741] As used herein in the context of a composition comprising a lipid and a biologically active agent, the terms “treat,” “treatment,” and the like, refer to relief from or alleviation of pathological processes. In the context of the present disclosure insofar as it relates to any of the other conditions recited herein below (other than pathological processes mediated by expression of a target gene or gene product, such as a protein), the terms “treat,” “treatment,” and the like mean to relieve or alleviate at least one symptom associated with such condition, or to slow or reverse the progression or anticipated progression of such condition, such as slowing the progression of a lipid disorder, such as atherosclerosis.

[1742] By “lower” in the context of a disease marker or symptom is meant a statistically significant decrease in such level. The decrease can be, for example, at least 10%, at least 20%, at least 30%, at least 40% or more. If, for a particular disease, or for an individual suffering from a particular disease, the levels or expression of a target gene or gene product are elevated, treatment with a composition comprising a lipid and a biologically active agent of the present disclosure can preferably reduce the level or expression of a target gene to a level considered in the literature as within the range of normal for an individual without such disorder.

[1743] The level or expression of a target gene can be measured by evaluation of mRNA (e.g., via Northern blots or PCR), or protein (e.g., Western blots). The effect of a composition comprising a lipid and a biologically active agent on target gene expression can be determined by measuring target gene transcription rates (e.g., via Northern blots; or reverse transcriptase polymerase chain reaction or real-time polymerase chain reaction). Direct measurements can be made of levels of a target gene product, e.g. by Western blots of tissues in which the target gene is expressed.

[1744] In another embodiment of the disclosure, a composition comprising a lipid and a biologically active agent can be administered to non-human animals. For example, the compositions can be given to chickens, turkeys, livestock animals (such as sheep, pigs, horses, cattle, etc.), companion animals (e.g., cats and dogs) and can have efficacy in treatment of cancer and viral diseases. In each case, a biologically active agent would be selected to match the characteristics (e.g., structure, sequence, etc.) of the target gene or gene product of the genome of the animal.

[1745] By “treatment” is meant prophylaxis, therapy, cure, or any other change in a patient's condition indicating improvement or absence of degradation of physical condition. By “treatment” is meant treatment of target gene-related disease (e.g., cancer or viral disease), or any appropriate treatment of any other ailment the patient has. As used herein, the terms “treatment” and “treat” refer to both prophylactic or preventative treatment and curative or disease-modifying treatment, including treatment of patients at risk of contracting a disease or suspected of having a disease, as well as patients already ill or diagnosed as suffering from a condition. The terms “treatment” and “treat” also refer to the maintenance and/or promotion of health in an individual not suffering from a disease but who may be susceptible to developing an unhealthy condition, such as nitrogen imbalance or muscle loss. In one embodiment, “treatment” does not encompass prevention of a disease state. Thus, the present disclosure is useful for suppressing expression of the target gene or gene product and/or treating a target gene-related disease in an individual afflicted by an target gene-related disease, or an individual susceptible to a target gene-related disease. An individual “afflicted” by an target gene-related disease has demonstrated detectable symptoms characteristics of the disease, or had otherwise been shown clinically to have been exposed to or to carry target gene-related disease pathogens or markers. As non-limiting examples, an individual afflicted by an target gene-related disease can show outward symptoms; or can show no outward symptoms but can be shown with a clinical test to carry protein markers associated with an target gene-related disease, or proteins or genetic material associated with a pathogen in the blood.

[1746] An “effective amount” or a “therapeutically effective amount” is an amount that treats a disease or medical condition of an individual, or, more generally, provides a nutritional, physiological or medical benefit to an individual. As used herein, the phrases “therapeutically effective amount” and “prophylactically effective amount” refer to an amount that provides a therapeutic benefit in the treatment, prevention, or management of pathological processes mediated by target gene expression or an overt symptom of pathological processes mediated by target gene expression. The specific amount that is therapeutically effective can be readily determined by an ordinary medical practitioner, and may vary depending on factors known in the art, such as, e.g., the type of pathological processes mediated by target gene expression, the patient's history and age, the stage of pathological processes mediated by target gene expression, and administration of other agents that inhibit pathological processes mediated by a target gene.

[1747] In various embodiments of the disclosure, the patient is at least about 1, 5, 10, 20, 30, 40, 50, 55, 60, 65, 70, or 75 years of age. In various embodiments, the patient is no more than about 1, 5, 10, 20, 30, 40, 50, 55, 60, 65, 70, 75, 80, 90, or 100 years of age. In various embodiments the patient has a body weight of at least about 20, 30, 40, 50, 60, 70, 80, 90, 100, 120, 140, 160, 180, 200, 220, 240, 260, 280, 300, 320, 340, 360, 380 or 400 lbs. In various embodiments, the patient has a body weight of no more than about 20, 30, 40, 50, 60, 70, 80, 90, 100, 120, 140, 160, 180, 200, 220, 240, 260, 280, 300, 320, 340, 360, 380 or 400 lbs.

[1748] In various embodiments of the disclosure, the dosage [measuring only the active ingredient(s)] can be at least about 1, 5, 10, 25, 50, 100, 200, 250, 300, 250, 400, 450, 500, 550, 600, 650, 700, 750, 800, 850, 900, 950 or 1000 ng, 1, 5, 10, 25, 50, 100, 200, 250, 300, 250, 400, 450, 500, 550, 600, 650, 700, 750, 800, 850, 900, 950 or 1000 micrograms, 1, 5, 10, 25, 50, 100, 200, 250, 300, 250, 400, 450, 500, 550, 600, 650, 700, 750, 800, 850, 900, 950 or 1000 mg. In various embodiments, the dosage can be no more than about 10, 25, 50, 100, 200, 250, 300, 250, 400, 450, 500, 550, 600, 650, 700, 750, 800, 850, 900, 950 or 1000 mg. In various embodiments, the dosage can be administered at least more than once a day, daily, more than once a weekly, weekly, bi-weekly, monthly, and/or every 2, 3, 4, 5, 6, 7, 8, 9, 10, 11 or 12 months, or a combination thereof.

[1749] In various embodiments, the dosage is correlated to the body weight or body surface area of the individual. The actual dosage level can be varied to obtain an amount of active agent which is effective for a particular patient, composition and mode of administration, without being toxic to the patient. The selected dose will depend on a variety of pharmacokinetic factors, including the activity of the particular biologically active agent employed, the route of administration, the rate of excretion of biologically active agent, the duration of the treatment, other drugs, compounds and/or materials used in combination with a biologically active agent, the age, sex, weight, condition, general health and prior medical history of the patient, and like factors well known in the medical arts. A physician or veterinarian having ordinary skill in the art can readily determine the effective amount of a biologically active agent required. A suitable dose will be that amount which is the lowest dose effective to produce a therapeutic effect, or a dose low enough to produce a therapeutic effect without causing side effects.

### Use in Treating Muscle-Related Diseases and Disorders.

[1750] In various embodiments, a composition comprising a lipid and a biologically active agent can be used to treat a subject with a muscle-related disorder.

[1751] In various embodiments, a muscle-related disorder is sarcopenia, a muscle movement disorder, a muscle wasting-related disorder, muscle degeneration, muscle weakness, muscular dystrophy, Duchenne muscular dystrophy, heart failure, breathing disorder, skeletal muscle degeneration caused by malnutrition and disease, a muscle-related disease related to impaired insulin-dependent signaling, muscular dystrophy, amyotrophic lateral sclerosis, spinal muscle atrophy and spinal cord injury, ischemic muscle disease. In some embodiments, a muscle related disorder includes, for example, shoulder stiffness, frozen shoulder (stiff shoulder due to age), rheumatoid arthritis, myofascitis, neck muscle rigidity, neck-shoulder-arm syndrome, whiplash syndrome, sprain, tendon sheath inflammation, low back pain syndrome, skeletal muscle atrophy and the like.

[1752] In some embodiments, the present disclosure provides the following embodiments:

1. A composition comprising a lipid and a biologically active agent.
2. A composition comprising a lipid and a biologically active agent, characterized in that the composition delivers the biologically active agent into cells.
3. The composition of any one of the preceding embodiments, wherein the composition delivers the biologically active agent into the cytoplasm of the cells.
4. The composition of any one of the preceding embodiments, wherein the composition delivers the biologically active agent into the nucleus of the cells.
5. A composition comprising a lipid and a biologically active agent, wherein the composition delivers the biologically active agent into cells to a level higher than that observed for the biologically active agent absent the lipid.
6. A composition comprising a lipid and a biologically active agent, wherein the composition is characterized in that it delivers the biologically active agent into muscle cells.
7. The composition of any one of the preceding embodiments, wherein the composition delivers the biologically active agent into the cytoplasm of the muscle cells.
8. The composition of any one of the preceding embodiments, wherein the composition delivers the biologically active agent into the nucleus of the muscle cells.
9. The composition of any one of the preceding embodiments, wherein the composition is characterized in that when administered to a subject, the composition delivers the biologically active agent to a muscle cell in the subject.
10. The composition of any one of the preceding embodiments, wherein the composition delivers the biologically active agent into the cytoplasm of the muscle cells.
11. The composition of any one of the preceding embodiments, wherein the composition delivers the biologically active agent into the nucleus of the muscle cells.
12. A composition for delivery of a biologically active agent to a muscle cell or tissue, comprising a lipid and the biologically active agent.
13. A composition comprising a biologically active agent and a lipid selected from the list of: lauric acid, myristic acid, palmitic acid, stearic acid, oleic acid, linoleic acid, alpha-linolenic acid, gamma-linolenic acid, docosahexaenoic acid (cis-DHA), turbinaric acid and dilinoleyl.
14. A composition comprising a biologically active agent and a lipid selected from:

[chemical structure]

15. A composition comprising a biologically active agent and a lipid,

[1753] wherein the lipid comprises a C₁₀-C₄₀ linear, saturated or partially unsaturated, aliphatic chain, optionally substituted with one or more C₁₋₄ aliphatic group,

[1754] wherein the biologically active agent is selected from the group consisting of: a small molecule, a peptide, a protein, a component of a CRISPR-Cas system, a carbohydrate, a therapeutic agent, a chemotherapeutic agent, a vaccine, a nucleic acid, and a lipid.

16. A composition comprising a nucleic acid and a lipid, for delivery of the lipid to a muscle cell or tissue.
17. An oligonucleotide composition comprising a plurality of oligonucleotides, which share:
[1755] 1) a common base sequence;
[1756] 2) a common pattern of backbone linkages; and
[1757] 3) a common pattern of backbone phosphorus modifications;

[1758] wherein one or more oligonucleotides of the plurality are individually conjugated to a lipid.

18. A chirally controlled oligonucleotide composition comprising a lipid and a plurality of oligonucleotides, which oligonucleotides share:
[1759] 1) a common base sequence;
[1760] 2) a common pattern of backbone linkages; and
[1761] 3) a common pattern of backbone phosphorus modifications;

[1762] wherein:
[1763] b. the composition is chirally controlled in that the plurality of oligonucleotides share the same stereochemistry at one or more chiral internucleotidic linkages;
[1764] c. one or more oligonucleotides of the plurality are individually conjugated to a lipid; and
[1765] d. one or more oligonucleotides of the plurality are optionally and individually conjugated to a targeting compound or moiety.
   19. The composition of any one of the preceding embodiments, wherein the oligonucleotide comprises a sequence which is substantially complementary to that of a targeted element in a nucleic acid in a cell.
   20. The composition of any one of the preceding embodiments, wherein the oligonucleotide comprises a sequence which is substantially complementary to that of a targeted element in a nucleic acid in a cell in a subject.
   21. The composition of any one of the preceding embodiments, wherein the oligonucleotide comprises a sequence which is substantially complementary to that of a targeted element in a nucleic acid in a cell, wherein the nucleic acid is genomic.
   22. The composition of any one of the preceding embodiments, wherein the oligonucleotide comprises a sequence which is substantially complementary to that of a targeted element in a nucleic acid in a cell in a subject, wherein the nucleic acid is genomic.
   23. The composition of any one of the preceding embodiments, wherein the oligonucleotide comprises a sequence which is substantially complementary to that of a targeted element in a nucleic acid in a cell, wherein the targeted element is a mRNA or a portion thereof.
   24. The composition of any one of the preceding embodiments, wherein the oligonucleotide comprises a sequence which is substantially complementary to that of a targeted element in a nucleic acid in a cell in a subject, wherein the targeted element is a mRNA or a portion thereof.
   25. The composition of any one of the preceding embodiments, wherein the oligonucleotide comprises a sequence which is substantially complementary to that of a targeted element in a nucleic acid in a cell, wherein the targeted element is associated with a disease, disorder or condition.
   26. The composition of any one of the preceding embodiments, wherein the oligonucleotide comprises a sequence which is substantially complementary to that of a targeted element in a nucleic acid in a cell in a subject, wherein the targeted element is associated with a disease, disorder, or condition.
   27. The composition of any one of the preceding embodiments, wherein the oligonucleotide comprises a sequence which is substantially complementary to that of a targeted element in a nucleic acid in a muscle cell, wherein the targeted element is associated with a muscle disease, disorder, or condition.
   28. The composition of any one of the preceding embodiments, wherein the oligonucleotide comprises a sequence which is substantially complementary to that of a targeted element in a nucleic acid in a muscle cell in a subject, wherein the targeted element is associated with a muscle disease, disorder, or condition.
   29. The composition of any one of the preceding embodiments, wherein a muscle disease, disorder, or condition is DMD.
   30. The composition of any one of the preceding embodiments, wherein a targeted element in a nucleic acid is a targeted element in a transcript of dystrophin.
   31. The composition of any one of the preceding embodiments, wherein the oligonucleotides in the composition provide exon skipping of exon 51 of dystrophin.
   32. The composition of any one of embodiments 17-31, wherein the plurality of oligonucleotides share the same stereochemistry at five or more chiral internucleotidic linkages.
   33. The composition of any one of embodiments 17-31, wherein the plurality of oligonucleotides share the same stereochemistry at ten or more chiral internucleotidic linkages.
   34. The composition of any one of embodiments 17-31, wherein the plurality of oligonucleotides share the same stereochemistry at each of the chiral internucleotidic linkages so that they share a common pattern of backbone chiral centers.
   35. The composition of any one of the preceding embodiments, wherein one or more oligonucleotides of the plurality are independently conjugated to a lipid through a sugar moiety.
   36. The composition of any one of the preceding embodiments, wherein one or more oligonucleotides of the plurality are independently conjugated to a lipid through a 5′-OH on the oligonucleotide.
   37. The composition of any one of the preceding embodiments, wherein one or more oligonucleotides of the plurality are independently conjugated to a lipid through a 3′-OH on the oligonucleotide.
   38. The composition of any one of the preceding embodiments, wherein one or more oligonucleotides of the plurality are independently conjugated to a lipid through a nucleobase moiety.
   39. The composition of any one of the preceding embodiments, wherein one or more oligonucleotides of the plurality are independently conjugated to a lipid through an internucleotidic linkage.
   40. The composition of any one of the preceding embodiments, wherein each oligonucleotide of the plurality is individually conjugated to a lipid.
   41. The composition of any one of the preceding embodiments, wherein each oligonucleotide of the plurality is individually conjugated to the same lipid.
   42. The composition of any one of the preceding embodiments, wherein one or more oligonucleotides comprise two or more conjugated lipids.
   43. The composition of any one of the preceding embodiments, wherein one or more oligonucleotides comprise two or more conjugated lipids, wherein the lipids are the same.
   44. The composition of any one of embodiments 1-43, wherein one or more oligonucleotides comprises two or more conjugated lipids, wherein the lipids are different.
   45. A composition comprising a biologically active agent and a lipid, wherein the agent is any agent disclosed herein, and wherein the lipid is any lipid disclosed herein.
   46. A method of delivering an oligonucleotide to a muscle cell or tissue in a human subject, comprising:
[1766] (a) providing a composition of any one of the preceding embodiments; and
[1767] (b) administering the composition to the human subject such that the oligonucleotide is delivered to a muscle cell or tissue in the subject.
   47. A method for delivering a biologically active agent to a muscle cell or tissue comprising preparing a composition according to any one of the preceding embodiments and contacting the cell or tissue with the composition.
   48. A method of modulating the level of a transcript or gene product of a gene in a cell, the method comprising the step of contacting the cell with a composition according to any one of the preceding embodiments, wherein the biologically active agent is capable of modulating the level of the transcript or gene product.
   49. A method for inhibiting expression of a gene in a muscle cell or tissue comprising preparing a composition according to any one of the preceding embodiments and treating the muscle cell or tissue with the composition.
   50. A method for inhibiting expression of a gene in a muscle cell or tissue in a mammal comprising preparing a composition according to any one of the preceding embodiments and administering the composition to the mammal.
   51. A method of treating a disease that is caused by the over-expression of one or several proteins in a muscle cell or tissue in a subject, said method comprising the administration of a composition according to any one of the preceding embodiments to the subject.
   52. A method of treating a disease that is caused by a reduced, suppressed or missing expression of one or several proteins in a subject, said method comprising the administration of a composition according to any one of the preceding embodiments to the subject.
   53. A method for generating an immune response in a subject, said method comprising the administration of a composition according to any one of the preceding embodiments to the subject, wherein the biologically active compound is an immunomodulating nucleic acid.
   54. A method for treating a sign and/or symptom of a disease, disorder, or condition in a subject selected from cancer, a proliferative disease, disorder, or condition, a metabolic disease, disorder, or condition, an inflammatory disease, disorder, or condition, and a viral infection by providing a composition of any one of the preceding embodiments and administering the composition to the subject.
   55. A method of modulating the amount of exon skipping in a cell, the method comprising contacting the cell with a composition according to any one of the preceding embodiments, wherein the biologically active agent is capable of modulating the amount of exon skipping.
   56. A method of administering a biologically active agent to a subject in need thereof, comprising steps of providing a composition comprising the agent a lipid, and administering the composition to the subject, wherein the agent is any agent disclosed herein, and wherein the lipid is any lipid disclosed herein.
   57. A method of treating a disease in a subject, the method comprising steps of providing a composition comprising a biologically active agent and a lipid, and administering a therapeutically effective amount of the composition to the subject, wherein the agent is any agent disclosed herein, and wherein the lipid is any lipid disclosed herein, and wherein the disease is any disease disclosed herein.
   58. The composition or method of any one of the preceding embodiments, wherein a lipid comprises an R^{LD} group, wherein R^{LD} is an optionally substituted, C₁₀-C₈₀ saturated or partially unsaturated aliphatic group, wherein one or more methylene units are optionally and independently replaced by an optionally substituted group selected from C₁-C₆ alkylene, C₁-C₆ alkenylene, —C≡C—, a C₁-C₆ heteroaliphatic moiety, —C(R′)₂—, -Cy-, —O—, —S—, —S—S—, —N(R′)—, —C(O)—, —C(S)—, —C(NR′)—, —C(O)N(R′)—, —N(R′)C(O)N(R′)—, —N(R′)C(O)—, —N(R′)C(O)O—, —OC(O)N(R′)—, —S(O)—, —S(O)₂—, —S(O)₂N(R′)—, —N(R′)S(O)₂— —SC(O)—, —C(O)S—, —OC(O)—, and —C(O)O—, wherein:
[1768] each R′ is independently —R, —C(O)R, —CO₂R, or —SO₂R, or:
[1769] two R′ are taken together with their intervening atoms to form an optionally substituted aryl, carbocyclic, heterocyclic, or heteroaryl ring;
[1770] -Cy- is an optionally substituted bivalent ring selected from carbocyclylene, arylene, heteroarylene, and heterocyclylene; and
[1771] each R is independently hydrogen, or an optionally substituted group selected from C₁-C₆ aliphatic, phenyl, carbocyclyl, aryl, heteroaryl, or heterocyclyl.
   59. The composition or method of any one of the preceding embodiments, wherein a lipid comprises an optionally substituted C₁₀-C₄₀ saturated or partially unsaturated aliphatic chain.
   60. The composition or method of any one of the preceding embodiments, wherein a lipid comprises an optionally substituted C₁₀-C₄₀ linear, saturated or partially unsaturated, aliphatic chain.
   61. The composition or method of any one of the preceding embodiments, wherein a lipid comprises a C₁₀-C₄₀ linear, saturated or partially unsaturated, aliphatic chain, optionally substituted with one or more C₁₋₄ aliphatic group.
   62. The composition or method of any one of the preceding embodiments, wherein a lipid comprises an unsubstituted C₁₀-C₄₀ linear, saturated or partially unsaturated, aliphatic chain.
   63. The composition or method of any one of the preceding embodiments, wherein a lipid comprises no more than one optionally substituted C₁₀-C₄₀ linear, saturated or partially unsaturated, aliphatic chain.
   64. The composition or method of any one of the preceding embodiments, wherein a lipid comprises two or more optionally substituted C₁₀-C₄₀ linear, saturated or partially unsaturated, aliphatic chain.
   65. The composition or method of any one of the preceding embodiments, wherein a lipid comprises no tricyclic or polycyclic moiety.
   66. The composition or method of any one of the preceding embodiments, wherein a lipid has the structure of R¹—COOH, wherein R¹ is an optionally substituted C₁₀-C₄₀ saturated or partially unsaturated aliphatic chain.
   67. The composition or method of any one of embodiment 16, wherein the lipid is conjugated through its carboxyl group.
   68. The composition or method according to any one of the preceding embodiments, wherein the lipid is selected from:

[chemical structure]

69. The composition or method of any one of the preceding embodiments, wherein the lipid is conjugated to the biologically active agent.
70. The composition or method of any one of the preceding embodiments, wherein the lipid is directly conjugated to the biologically active agent.
71. The composition or method of any one of the preceding embodiments, wherein the lipid is conjugated to the biologically active agent via a linker.
72. The composition or method of any one of the preceding embodiments, wherein the linker is -L-, wherein L is L is a covalent bond or an optionally substituted, linear or branched C₁-C₁₀ alkylene, wherein one or more methylene units of L are optionally and independently replaced by an optionally substituted group selected from C₁-C₆ alkylene, C₁-C₆ alkenylene, —C≡C—, a C₁-C₆ heteroaliphatic moiety, —C(R′)₂—, -Cy-, —O—, —S—, —S—S—, —N(R′)—, —C(O)—, —C(S)—, —C(NR′)—, —C(O)N(R′)—, —N(R′)C(O)N(R′)—, —N(R′)C(O)—, —N(R′)C(O)O—, —OC(O)N(R′)—, —S(O)—, —S(O)₂—, —S(O)₂N(R′)—, —N(R′)S(O)₂— —SC(O)—, —C(O)S—, —OC(O)—, and —C(O)O—;
[1772] each R′ is independently —R, —C(O)R, —CO₂R, or —SO₂R, or:
[1773] two R′ are taken together with their intervening atoms to form an optionally substituted aryl, carbocyclic, heterocyclic, or heteroaryl ring;
[1774] -Cy- is an optionally substituted bivalent ring selected from carbocyclylene, arylene, heteroarylene, and heterocyclylene; and
[1775] each R is independently hydrogen, or an optionally substituted group selected from C₁-C₆ aliphatic, phenyl, carbocyclyl, aryl, heteroaryl, or heterocyclyl.
   73. The composition or method of any one of the preceding embodiments, wherein the linker is selected from: an uncharged linker; a charged linker; a linker comprising an alkyl; a linker comprising a phosphate; a branched linker; an unbranched linker; a linker comprising at least one cleavage group; a linker comprising at least one redox cleavage group; a linker comprising at least one phosphate-based cleavage group; a linker comprising at least one acid-cleavage group; a linker comprising at least one ester-based cleavage group; and a linker comprising at least one peptide-based cleavage group.
   74. The composition or method of any one of the preceding embodiments, wherein the nucleic acid is an oligonucleotide, an antisense oligonucleotide, an RNAi agent, a miRNA, splice switching oligonucleotide (SSO), immunomodulatory nucleic acid, an aptamer, a ribozyme, a mRNA, a lncRNA, a ncRNA, an antigomir (e.g., an antagonist to a miRNA, lncRNA, ncRNA or other nucleic acid), a plasmid, a vector, or a portion thereof.
   75. The composition or method of any one of the preceding embodiments, wherein the RNAi agent is a siRNA, a shRNA, a miRNA, a sisiRNA, a meroduplex RNA (mdRNA), a DNA-RNA chimera, a siRNA comprising two mismatches (or more mismatches), a neutral siRNA, an aiRNA, or a siRNA comprising a terminal or internal spacer.
   76. The composition or method of any one of the preceding embodiments, wherein each oligonucleotide of the plurality is individually conjugated to the same lipid at the same location.
   77. The composition or method of any one of the preceding embodiments, wherein a lipid is conjugated to an oligonucleotide through a linker.
   78. The composition or method of any one of the preceding embodiments, wherein one or more oligonucleotides of the plurality are independently conjugated to a targeting compound or moiety.
   79. The composition or method of any one of the preceding embodiments, wherein one or more oligonucleotides of the plurality are independently conjugated to a lipid and a targeting compound or moiety.
   80. The composition or method of any one of the preceding embodiments, wherein one or more oligonucleotides of the plurality are independently conjugated to a lipid at one end and a targeting compound or moiety at the other.
   81. The composition or method of any one of the preceding embodiments, wherein oligonucleotides of the plurality share the same chemical modification patterns.
   82. The composition or method of any one of the preceding embodiments, wherein oligonucleotides of the plurality share the same chemical modification patterns comprising one or more base modifications.
   83. The composition or method of any one of the preceding embodiments, wherein oligonucleotides of the plurality share the same chemical modification patterns comprising one or more sugar modifications.
   84. The composition or method of any one of the preceding embodiments, wherein the common base sequence is capable of hybridizing with a transcript in a muscle cell, which transcript contains a mutation that is linked to a muscle disease, or whose level, activity and/or distribution is linked to a muscle disease.
   85. The composition or method of any one of the preceding embodiments, wherein the common base sequence is capable of hybridizing with a transcript in a muscle cell, and the composition is characterized in that when it is contacted with the transcript in a transcript splicing system, splicing of the transcript is altered relative to that observed under reference conditions selected from the group consisting of absence of the composition, presence of a reference composition, and combinations thereof.
   86. The composition or method of any one of the preceding embodiments, wherein the common base sequence hybridizes with a transcript of dystrophin.
   87. The composition or method of any one of the preceding embodiments, wherein the common base sequence hybridizes with a transcript of dystrophin, and the composition increases the production of one or more functional or partially functional proteins encoded by dystrophin.
   88. The composition or method of any one of the preceding embodiments, wherein the oligonucleotide or oligonucleotides is or are splice switching oligonucleotide or oligonucleotides.
   89. The composition or method of any one of the preceding embodiments, wherein the plurality of oligonucleotides share a common pattern of sugar modification, which comprises 3, 4, 5, 6, 7, 8, 9 or more 2′-F.
   90. The composition or method of any one of the preceding embodiments, wherein the plurality of oligonucleotides share a common pattern of sugar modification, which comprises 3 or more 2′-F.
   91. The composition or method of any one of the preceding embodiments, wherein the plurality of oligonucleotides share a common pattern of sugar modification, which comprises 3, 4, 5, 6, 7, 8, 9 or more consecutive 2′-F.
   92. The composition or method of any one of the preceding embodiments, wherein the plurality of oligonucleotides share a common pattern of sugar modification, which comprises 3 or more consecutive 2′-F.
   93. The composition or method of any one of the preceding embodiments, wherein the plurality of oligonucleotides share a common pattern of sugar modification, which comprises 3, 4, 5, 6, 7, 8, 9 or more 2′-F within the 10 nucleotides at the 5′-end.
   94. The composition or method of any one of the preceding embodiments, wherein the plurality of oligonucleotides share a common pattern of sugar modification, which comprises 3 or more 2′-F within the 10 nucleotides at the 5′-end.
   95. The composition or method of any one of the preceding embodiments, wherein the plurality of oligonucleotides share a common pattern of sugar modification, which comprises 3, 4, 5, 6, 7, 8, 9 or more consecutive 2′-F at the 5′-end.
   96. The composition or method of any one of the preceding embodiments, wherein the plurality of oligonucleotides share a common pattern of sugar modification, which comprises 3 or more consecutive 2′-F at the 5′-end.
   97. The composition or method of any one of the preceding embodiments, wherein the plurality of oligonucleotides share a common pattern of sugar modification, which comprises 3, 4, 5, 6, 7, 8, 9 or more consecutive 2′-F within the 10 nucleotides at the 5′-end.
   98. The composition or method of any one of the preceding embodiments, wherein the plurality of oligonucleotides share a common pattern of sugar modification, which comprises 3 or more consecutive 2′-F within the 10 nucleotides at the 5′-end.
   99. The composition or method of any one of the preceding embodiments, wherein the plurality of oligonucleotides share a common pattern of sugar modification, which comprises 3, 4, 5, 6, 7, 8, 9 or more 2′-F within the 10 nucleotides at the 3′-end.
   100. The composition or method of any one of the preceding embodiments, wherein the plurality of oligonucleotides share a common pattern of sugar modification, which comprises 3 or more 2′-F within the 10 nucleotides at the 3′-end.
   101. The composition or method of any one of the preceding embodiments, wherein the plurality of oligonucleotides share a common pattern of sugar modification, which comprises 3, 4, 5, 6, 7, 8, 9 or more consecutive 2′-F at the 3′-end.
   102. The composition or method of any one of the preceding embodiments, wherein the plurality of oligonucleotides share a common pattern of sugar modification, which comprises 3 or more consecutive 2′-F at the 3′-end.
   103. The composition or method of any one of the preceding embodiments, wherein the plurality of oligonucleotides share a common pattern of sugar modification, which comprises 3, 4, 5, 6, 7, 8, 9 or more consecutive 2′-F within the 10 nucleotides at the 3′-end.
   104. The composition or method of any one of the preceding embodiments, wherein the plurality of oligonucleotides share a common pattern of sugar modification, which comprises 3 or more consecutive 2′-F within the 10 nucleotides at the 3′-end.
   105. The composition or method of any one of the preceding embodiments, wherein the plurality of oligonucleotides share a common pattern of sugar modification, which comprises 5 or more 2′-F within the 10 nucleotides at the 5′-end.
   106. The composition or method of any one of the preceding embodiments, wherein the plurality of oligonucleotides share a common pattern of sugar modification, which comprises 5 or more consecutive 2′-F within the 10 nucleotides at the 5′-end.
   107. The composition or method of any one of the preceding embodiments, wherein the plurality of oligonucleotides share a common pattern of sugar modification, which comprises 5 or more 2′-F within the 10 nucleotides at the 3′-end.
   108. The composition or method of any one of the preceding embodiments, wherein the plurality of oligonucleotides share a common pattern of sugar modification, which comprises 6 or more consecutive 2′-F within the 10 nucleotides at the 5′-end.
   109. The composition or method of any one of the preceding embodiments, wherein the plurality of oligonucleotides share a common pattern of sugar modification, which comprises 6 or more 2′-F within the 10 nucleotides at the 3′-end.
   110. The composition or method of any one of the preceding embodiments, wherein the plurality of oligonucleotides share a common pattern of sugar modification, which comprises 7 or more consecutive 2′-F at the 5′-end.
   111. The composition or method of any one of the preceding embodiments, wherein the plurality of oligonucleotides share a common pattern of sugar modification, which comprises 7 or more consecutive 2′-F at the 3′-end.
   112. The composition or method of any one of the preceding embodiments, wherein the plurality of oligonucleotides share a common pattern of sugar modification, which comprises 3 or more consecutive 2′-F at the 5′-end, 3 or more consecutive 2′-F at the 3′-end, and 3 or more 2′-OR between the 5′-end 2′-F and the 3′-end 2′-F modifications.
   113. The composition or method of any one of the preceding embodiments, wherein the plurality of oligonucleotides share a common pattern of sugar modification, which comprises 3 or more 2′-F at the 5′-end, 3 or more 2′-F at the 3′-end, and 3 or more 2′-OR between the 5′-end 2′-F and the 3′-end 2′-F modifications.
   114. The composition or method of any one of the preceding embodiments, wherein the plurality of oligonucleotides share a common pattern of sugar modification, which comprises 7 or more 2′-F within the 10 nucleotides at the 3′-end.
   115. The composition or method of any one of the preceding embodiments, wherein the plurality of oligonucleotides share a common pattern of sugar modification, which comprises 5 or more consecutive 2′-F within the 10 nucleotides at the 3′-end.
   116. The composition or method of any one of the preceding embodiments, wherein the plurality of oligonucleotides share a common pattern of sugar modification, which comprises 7 or more consecutive 2′-F at the 3′-end.
   117. The composition or method of any one of the preceding embodiments, wherein the plurality of oligonucleotides comprises a 5′-wing-core-wing-3′ structure, wherein each wing region independently comprises 3 to 10 nucleosides, and the core region independently comprises 3 to 10 nucleosides.
   118. The composition or method of any one of the preceding embodiments, wherein the plurality of oligonucleotides comprises a 5′-wing-core-3′ or a 5′-core-wing-3′ structure, wherein each wing region independently comprises 3 to 10 nucleosides, and the core region independently comprises 3 to 10 nucleosides.
   119. The composition or method of any one of the preceding embodiments, wherein a 5′-wing region comprises 3, 4, 5, 6, 7, 8, 9 or more 2′-F.
   120. The composition or method of any one of the preceding embodiments, wherein a 5′-wing region comprises 3 or more 2′-F.
   121. The composition or method of any one of the preceding embodiments, wherein a 5′-wing region comprises 5 or more 2′-F.
   122. The composition or method of any one of the preceding embodiments, wherein a 5′-wing region comprises 3, 4, 5, 6, 7, 8, 9 or more consecutive 2′-F.
   123. The composition or method of any one of the preceding embodiments, wherein a 5′-wing region comprises 3 or more consecutive 2′-F.
   124. The composition or method of any one of the preceding embodiments, wherein a 5′-wing region comprises 5 or more consecutive 2′-F.
   125. The composition or method of any one of the preceding embodiments, wherein a 5′-wing region comprises 10%, 20%, 30%, 40%, 50%, 60%, 70%, 80%, 90% or more 2′-F.
   126. The composition or method of any one of the preceding embodiments, wherein each sugar of a 5′-wing region comprises a 2′-F.
   127. The composition or method of any one of the preceding embodiments, wherein a 5′-wing region comprises 3 or more chiral internucleotidic linkages.
   128. The composition or method of any one of the preceding embodiments, wherein a 5′-wing region comprises 3 or more consecutive chiral internucleotidic linkages.
   129. The composition or method of any one of the preceding embodiments, wherein a 5′-wing region comprises 10% or more chiral internucleotidic linkages.
   130. The composition or method of any one of the preceding embodiments, wherein each internucleotidic linkage of a 5′-wing region is chiral.
   131. The composition or method of any one of the preceding embodiments, wherein each internucleotidic linkage of a 5′-wing region is a phosphorothioate linkage.
   132. The composition or method of any one of the preceding embodiments, wherein a 5′-wing region comprises 5 or more Rp chiral internucleotidic linkages.
   133. The composition or method of any one of the preceding embodiments, wherein a 5′-wing region comprises 5 or more Rp consecutive internucleotidic linkages.
   134. The composition or method of any one of the preceding embodiments, wherein a 5′-wing region comprises 10%, 20%, 30%, 40%, 50%, 60%, 70%, 80%, 90% or more Rp internucleotidic linkages.
   135. The composition or method of any one of the preceding embodiments, wherein each internucleotidic linkage of a 5′-wing region is Rp.
   136. The composition or method of any one of the embodiments 1-134, wherein a 5′-wing region comprises 5 or more Sp chiral internucleotidic linkages.
   137. The composition or method of any one of the embodiments 1-134, wherein a 5′-wing region comprises 5 or more Sp consecutive internucleotidic linkages.
   138. The composition or method of any one of the embodiments 1-134, wherein a 5′-wing region comprises 10%, 20%, 30%, 40%, 50%, 60%, 70%, 80%, 90% or more Sp internucleotidic linkages.
   139. The composition or method of any one of the embodiments 1-134, wherein each internucleotidic linkage of a 5′-wing region is Sp.
   140. The composition or method of any one of the preceding embodiments, wherein a 3′-wing region comprises 3, 4, 5, 6, 7, 8, 9 or more 2′-F.
   141. The composition or method of any one of the preceding embodiments, wherein a 3′-wing region comprises 3 or more 2′-F.
   142. The composition or method of any one of the preceding embodiments, wherein a 3′-wing region comprises 5 or more 2′-F.
   143. The composition or method of any one of the preceding embodiments, wherein a 3′-wing region comprises 3, 4, 5, 6, 7, 8, 9 or more consecutive 2′-F.
   144. The composition or method of any one of the preceding embodiments, wherein a 3′-wing region comprises 3 or more consecutive 2′-F.
   145. The composition or method of any one of the preceding embodiments, wherein a 3′-wing region comprises 5 or more consecutive 2′-F.
   146. The composition or method of any one of the preceding embodiments, wherein a 3′-wing region comprises 10%, 20%, 30%, 40%, 50%, 60%, 70%, 80%, 90%, or more 2′-F.
   147. The composition or method of any one of the preceding embodiments, wherein each sugar of a 3′-wing region comprises a 2′-F.
   148. The composition or method of any one of the preceding embodiments, wherein a 3′-wing region comprises 3 or more chiral internucleotidic linkages.
   149. The composition or method of any one of the preceding embodiments, wherein a 3′-wing region comprises 5 or more consecutive internucleotidic linkages.
   150. The composition or method of any one of the preceding embodiments, wherein a 3′-wing region comprises 10%, 20%, 30%, 40%, 50%, 60%, 70%, 80%, 90% or more chiral internucleotidic linkages.
   151. The composition or method of any one of the preceding embodiments, wherein each internucleotidic linkage of a 3′-wing region is chiral.
   152. The composition or method of any one of the preceding embodiments, wherein each internucleotidic linkage of a 3′-wing region is a phosphorothioate linkage.
   153. The composition or method of any one of the preceding embodiments, wherein a 3′-wing region comprises 3 or more Rp chiral internucleotidic linkages.
   154. The composition or method of any one of the preceding embodiments, wherein a 3′-wing region comprises 5 or more Rp consecutive internucleotidic linkages.
   155. The composition or method of any one of the preceding embodiments, wherein a 3′-wing region comprises 10%, 20%, 30%, 40%, 50%, 60%, 70%, 80%, 90% or more Rp internucleotidic linkages.
   156. The composition or method of any one of the preceding embodiments, wherein each internucleotidic linkage of a 3′-wing region is Rp.
   157. The composition or method of any one of the embodiments 1-155, wherein a 3′-wing region comprises 3 or more Sp chiral internucleotidic linkages.
   158. The composition or method of any one of the embodiments 1-155, wherein a 3′-wing region comprises 5 or more Sp consecutive internucleotidic linkages.
   159. The composition or method of any one of the embodiments 1-155, wherein a 3′-wing region comprises 10%, 20%, 30%, 40%, 50%, 60%, 70%, 80%, 90% or more Sp internucleotidic linkages.
   160. The composition or method of any one of the embodiments 1-155, wherein each internucleotidic linkage of a 3′-wing region is Sp.
   161. The composition or method of any one of the preceding embodiments, wherein the 5′-wing and the 3′-wing have the same length, pattern of chemical modifications, pattern of backbone internucleotidic linkages, and pattern of backbone chiral centers.
   162. The composition or method of any one of the preceding embodiments, wherein the internucleotidic linkage between the 5′-wing region and the core region is a chiral internucleotidic linkage.
   163. The composition or method of any one of the preceding embodiments, wherein the internucleotidic linkage between the 5′-wing region and the core region is a phosphorothioate linkage.
   164. The composition or method of any one of the preceding embodiments, wherein the internucleotidic linkage between the 5′-wing region and the core region is an Rp phosphorothioate linkage.
   165. The composition or method of any one of the preceding embodiments, wherein the internucleotidic linkage between the 3′-wing region and the core region is a chiral internucleotidic linkage.
   166. The composition or method of any one of the preceding embodiments, wherein the internucleotidic linkage between the 3′-wing region and the core region is a phosphorothioate linkage.
   167. The composition or method of any one of the preceding embodiments, wherein the internucleotidic linkage between the 3′-wing region and the core region is an Rp phosphorothioate linkage.
   168. The composition or method of any one of the preceding embodiments, wherein a core region comprises 3, 4, 5, 6, 7, 8, 9 or more 2′-OR.
   169. The composition or method of any one of the preceding embodiments, wherein a core region comprises 3 or more 2′-OR.
   170. The composition or method of any one of the preceding embodiments, wherein a core region comprises 5 or more consecutive 2′-OR.
   171. The composition or method of any one of the preceding embodiments, wherein a core region comprises 10%, 20%, 30%, 40%, 50%, 60%, 70%, 80%, 90% or more 2′-OR.
   172. The composition or method of any one of the preceding embodiments, wherein each sugar of a core region comprises a 2′-OR.
   173. The composition or method of any one of the preceding embodiments, wherein a 2′-OR modification is a 2′-OMe modification.
   174. The composition or method of any one of the preceding embodiments, wherein a core region comprises 3 or more chiral internucleotidic linkages.
   175. The composition or method of any one of the preceding embodiments, wherein a core region comprises 5 or more consecutive chiral internucleotidic linkages.
   176. The composition or method of any one of the preceding embodiments, wherein a core region comprises 10% or more chiral internucleotidic linkages.
   177. The composition or method of any one of the preceding embodiments, wherein each internucleotidic linkage of a core region is chiral.
   178. The composition or method of any one of the preceding embodiments, wherein each internucleotidic linkage of a core region is a phosphorothioate linkage.
   179. The composition or method of any one of the preceding embodiments, wherein a core region comprises 3, 4, 5, 6, 7, 8, 9 or more Sp chiral internucleotidic linkages.
   180. The composition or method of any one of the preceding embodiments, wherein a core region comprises 3 or more Sp chiral internucleotidic linkages.
   181. The composition or method of any one of the preceding embodiments, wherein a core region comprises 5 or more Sp consecutive internucleotidic linkages.
   182. The composition or method of any one of the preceding embodiments, wherein a core region comprises 10%, 20%, 30%, 40%, 50%, 60%, 70%, 80%, 90% or more Sp internucleotidic linkages.
   183. The composition or method of any one of the preceding embodiments, wherein each internucleotidic linkage of a core region is Sp.
   184. The composition or method of any one of embodiments 1-182, wherein a core region comprises 3, 4, 5, 6, 7, 8, 9 or more Rp chiral internucleotidic linkages.
   185. The composition or method of any one of embodiments 1-182, wherein a core region comprises 3 or more Rp chiral internucleotidic linkages.
   186. The composition or method of any one of embodiments 1-182, wherein a core region comprises 5 or more Rp consecutive internucleotidic linkages.
   187. The composition or method of any one of embodiments 1-182, wherein a core region comprises 10%, 20%, 30%, 40%, 50%, 60%, 70%, 80%, 90% or more Rp internucleotidic linkages.
   188. The composition or method of any one of embodiments 1-178, wherein each internucleotidic linkage of a core region is Rp.
   189. The composition or method of any one of the preceding embodiments, wherein a 5′-wing region comprises 10% or more Sp internucleotidic linkages.
   190. The composition or method of any one of the preceding embodiments, wherein a 3′-wing region comprises 10% or more Sp internucleotidic linkages.
   191. The composition or method of any one of the preceding embodiments, wherein the internucleotidic linkage between the 5′-wing region and the core region is an Sp phosphorothioate linkage.
   192. The composition or method of any one of the preceding embodiments, wherein the internucleotidic linkage between the 3′-wing region and the core region is an Sp phosphorothioate linkage.
   193. The composition or method of any one of the preceding embodiments, wherein the nucleic acid is a splice switching oligonucleotide (SSO).
   194. The composition or method of any one of the preceding embodiments, wherein the nucleic acid is a splice switching oligonucleotide (SSO) which targets dystrophin.
   195. The composition or method of any one of the preceding embodiments, wherein the nucleic acid is a splice switching oligonucleotide (SSO) which targets dystrophin exon 51, 45, 53 or 44.
   196. The composition or method of any one of the preceding embodiments, wherein the nucleic acid is a splice switching oligonucleotide (SSO) which targets dystrophin exon 51.
   197. The composition or method of any one of the preceding embodiments, wherein the immunomodulatory nucleic acid is a CpG oligonucleotide.
   198. The composition or method of any one of the preceding embodiments, wherein the immunomodulatory nucleic acid is a CpG oligonucleotide which is capable of agonizing an immune response which is TLR9-mediated or TLR9-associated.
   199. The composition or method of any one of the preceding embodiments, wherein the immunomodulatory nucleic acid is a CpG oligonucleotide which is capable of antagonizing an immune response which is TLR9-mediated or TLR9-associated.
   200. The composition or method of any one of the preceding embodiments, wherein the oligonucleotide comprises a strand of about 14 to about 49 nucleotides.
   201. The composition or method of any one of the preceding embodiments, where the oligonucleotide further comprises a second strand.
   202. The composition or method of any one of the preceding embodiments, wherein the oligonucleotide comprises at least one modification to a base, sugar or internucleoside linkage.
   203. The composition or method of any one of the preceding embodiments, wherein the modification is a sugar modifications at the 2′ carbon.
   204. The composition or method of any one of the preceding embodiments, wherein the modification is a sugar modifications at the 2′ carbon selected from: 2′-MOE, 2′-OMe, and 2′-F.
   205. The composition or method of any one of the preceding embodiments, wherein the biologically active agent is a nucleic acid.
   206. The composition or method of any one of the preceding embodiments, wherein the biologically active agent is an immunomodulatory nucleic acid.
   207. The composition or method of any one of the preceding embodiments, wherein the biologically active agent is a CpG oligonucleotide that agonizes or antagonizes an immune response
   208. The composition or method of any one of the preceding embodiments, wherein the biologically active agent is an CpG oligonucleotide that agonizes or antagonizes an immune response which is TLR9-mediated or TLR9-associated.
   209. The composition or method of any one of the preceding embodiments, wherein the biologically active agent is a small molecule, and wherein the small molecule is hydrophobic
   210. The composition or method of any one of the preceding embodiments, wherein the biologically active agent is a hydrophobic small molecule selected from the group consisting of a sterol and a hydrophobic vitamin.
   211. The composition or method of any one of the preceding embodiments, wherein the biologically active agent is cholesterol.
   212. The composition or method of any one of the preceding embodiments, wherein the biologically active agent is a protein selected from the group consisting of a nucleoprotein, a mucoprotein, a lipoprotein, a synthetic polypeptide, a small molecule linked to a protein and a glycoprotein.
   213. The composition or method of any one of the preceding embodiments, wherein the biologically active agent is a nucleic acid in the form of a single stranded or partially double stranded oligomer or a polymer composed of ribonucleotides.
   214. The composition or method of any one of the preceding embodiments, wherein the biologically active agent is a nucleic acid selected from the group consisting of miRNA, antisense oligonucleotides, siRNA, immune-stimulatory oligonucleotides, aptamers, Piwi-interacting RNAs (piRNAs), small nucleolar RNAs (snoRNAs), ribozymes, and plasmids encoding a specific gene or siRNA.
   215. The composition or method of any one of the preceding embodiments, wherein the cell or tissue is a muscle cell or tissue.
   216. The composition or method of any one of the preceding embodiments, wherein the biologically active agent is an oligonucleotide.
   217. The composition or method of any one of the preceding embodiments, wherein the biologically active agent is an oligonucleotide which mediates exon skipping.
   218. The composition or method of any one of the preceding embodiments, wherein the biologically active agent is a stereodefined oligonucleotide which mediates exon skipping.
   219. The composition or method of any one of the preceding embodiments, wherein the disease or disorder is a muscle-related disease or disorder.
   220. The composition or method of any one of the preceding embodiments, wherein the muscle-related disorder is sarcopenia, a muscle movement disorder, a muscle wasting-related disorder, muscle degeneration, muscle weakness, muscular dystrophy, Duchenne muscular dystrophy, heart failure, breathing disorder, skeletal muscle degeneration caused by malnutrition and disease, a muscle-related disease related to impaired insulin-dependent signaling, amyotrophic lateral sclerosis, spinal muscle atrophy and spinal cord injury, ischemic muscle disease.
   221. The composition or method of any one of the preceding embodiments, wherein the cell or tissue is a muscle cell or tissue, wherein the biologically active agent is a stereodefined oligonucleotide which is a splice switching oligonucleotide, and wherein the subject is afflicted with a muscle disorder.
   222. The composition or method of any one of the preceding embodiments, wherein the cell or tissue is a muscle cell or tissue, wherein the biologically active agent is a stereodefined oligonucleotide which is a splice switching oligonucleotide, and wherein the subject is afflicted with muscular dystrophy.
   223. The composition or method of any one of the preceding embodiments, wherein the cell or tissue is a muscle cell or tissue, wherein the biologically active agent is a stereodefined oligonucleotide which is a splice switching oligonucleotide, and wherein the subject is afflicted with Duchenne muscular dystrophy.
   224. The composition or method of any one of the preceding embodiments, wherein sequences of the oligonucleotides comprise or consist of a sequence listed in tables in the Specification.
   225. The composition or method of any one of the preceding embodiments, wherein sequences of the oligonucleotides comprise or consist of UCAAGGAAGAUGGCAUUUCU (SEQ ID NO: 1).
   226. The composition or method of any one of the preceding embodiments, wherein the lipid comprises an optionally substituted, C₁₀-C₈₀ saturated or partially unsaturated aliphatic group, wherein one or more methylene units are optionally and independently replaced by an optionally substituted group selected from C₁-C₆ alkylene, C₁-C₆ alkenylene, —C≡C—, a C₁-C₆ heteroaliphatic moiety, —C(R′)₂—, -Cy-, —O—, —S—, —S—S—, —N(R′)—, —C(O)—, —C(S)—, —C(NR′)—, —C(O)N(R′)—, —N(R′)C(O)N(R′)—, —N(R′)C(O)—, —N(R′)C(O)O—, —OC(O)N(R′)—, —S(O)—, —S(O)₂—, —S(O)₂N(R′)—, —N(R′)S(O)₂—, —SC(O)—, —C(O)S—, —OC(O)—, and —C(O)O—, wherein each variable is independently as defined and described herein.
   227. The composition or method of any one of the preceding embodiments, wherein the lipid comprises an optionally substituted C₁₀-C₈₀ saturated or partially unsaturated, aliphatic chain.
   228. The composition or method of any one of the preceding embodiments, wherein the lipid comprises an optionally substituted C₁₀-C₈₀ linear, saturated or partially unsaturated, aliphatic chain.
   229. The composition or method of any one of the preceding embodiments, wherein the lipid comprises an optionally substituted C₁₀-C₆₀ saturated or partially unsaturated, aliphatic chain.
   230. The composition or method of any one of the preceding embodiments, wherein the lipid comprises an optionally substituted C₁₀-C₆₀ linear, saturated or partially unsaturated, aliphatic chain.
   231. The composition or method of any one of the preceding embodiments, wherein the lipid comprises an optionally substituted C₁₀-C₄₀ saturated or partially unsaturated, aliphatic chain.
   232. The composition or method of any one of the preceding embodiments, wherein the lipid comprises an optionally substituted C₁₀-C₄₀ linear, saturated or partially unsaturated, aliphatic chain.
   233. The composition or method of any one of the preceding embodiments, wherein the lipid comprises an optionally substituted, C₁₀-C₆₀ saturated or partially unsaturated aliphatic group, wherein one or more methylene units are optionally and independently replaced by an optionally substituted group selected from C₁-C₆ alkylene, C₁-C₆ alkenylene, —C≡C—, a C₁-C₆ heteroaliphatic moiety, —C(R′)₂—, -Cy-, —O—, —S—, —S—S—, —N(R′)—, —C(O)—, —C(S)—, —C(NR′)—, —C(O)N(R′)—, —N(R′)C(O)N(R′)—, —N(R′)C(O)—, —N(R′)C(O)O—, —OC(O)N(R′)—, —S(O)—, —S(O)₂—, —S(O)₂N(R′)—, —N(R′)S(O)₂—, —SC(O)—, —C(O)S—, —OC(O)—, and —C(O)O—, wherein each variable is independently as defined and described herein.
   234. The composition or method of any one of the preceding embodiments, wherein the lipid comprises an optionally substituted C₁₀-C₈₀ saturated or partially unsaturated, aliphatic chain.
   235. The composition or method of any one of the preceding embodiments, wherein the lipid comprises an optionally substituted C₁₀-C₆₀ linear, saturated or partially unsaturated, aliphatic chain.
   236. The composition or method of any one of the preceding embodiments, wherein the lipid comprises an optionally substituted C₁₀-C₄₀ linear, saturated or partially unsaturated, aliphatic chain.
   237. The composition or method of any one of the preceding embodiments, wherein the lipid comprises an optionally substituted, C₁₀-C₄₀ saturated or partially unsaturated aliphatic group, wherein one or more methylene units are optionally and independently replaced by an optionally substituted group selected from C₁-C₆ alkylene, C₁-C₆ alkenylene, —C≡C—, a C₁-C₆ heteroaliphatic moiety, —C(R′)₂—, -Cy-, —O—, —S—, —S—S—, —N(R′)—, —C(O)—, —C(S)—, —C(NR′)—, —C(O)N(R′)—, —N(R′)C(O)N(R′)—, —N(R′)C(O)—, —N(R′)C(O)O—, —OC(O)N(R′)—, —S(O)—, —S(O)₂—, —S(O)₂N(R′)—, —N(R′)S(O)₂—, —SC(O)—, —C(O)S—, —OC(O)—, and —C(O)O—, wherein each variable is independently as defined and described herein.
   238. The composition or method of any one of the preceding embodiments, wherein the lipid comprises an optionally substituted C₁₀-C₄₀ saturated or partially unsaturated, aliphatic chain.
   239. The composition or method of any one of the preceding embodiments, wherein the lipid comprises an optionally substituted C₁₀-C₄₀ linear, saturated or partially unsaturated, aliphatic chain.
   240. The composition or method of any one of the preceding embodiments, wherein the composition further comprises one or more additional components selected from: a polynucleotide, carbonic anhydrase inhibitor, a dye, an intercalating agent, an acridine, a cross-linker, psoralene, mitomycin C, a porphyrin, TPPC4, texaphyrin, Sapphyrin, a polycyclic aromatic hydrocarbon phenazine, dihydrophenazine, an artificial endonuclease, a chelating agent, EDTA, an alkylating agent, a phosphate, an amino, a mercapto, a PEG, PEG-40K, MPEG, [MPEG]₂, a polyamino, an alkyl, a substituted alkyl, a radiolabeled marker, an enzyme, a hapten biotin, a transport/absorption facilitator, aspirin, vitamin E, folic acid, a synthetic ribonuclease, a protein, a glycoprotein, a peptide, a molecule having a specific affinity for a co-ligand, an antibody, a hormone, a hormone receptor, a non-peptidic species, a lipid, a lectin, a carbohydrate, a vitamin, a cofactor, or a drug.
   241. The composition or method of any one of the preceding embodiments, wherein the lipid comprises a C₁₀-C₈₀ linear, saturated or partially unsaturated, aliphatic chain.
   242. The composition or method of any one of the preceding embodiments, wherein the composition further comprises a linker linking the biologically active agent and the lipid, wherein the linker is selected from: an uncharged linker; a charged linker; a linker comprising an alkyl; a linker comprising a phosphate; a branched linker; an unbranched linker; a linker comprising at least one cleavage group; a linker comprising at least one redox cleavage group; a linker comprising at least one phosphate-based cleavage group; a linker comprising at least one acid-cleavage group; a linker comprising at least one ester-based cleavage group; a linker comprising at least one peptide-based cleavage group.
   243. The composition or method of any one of the preceding embodiments, wherein the biologically active agent comprises or consists of or is an oligonucleotide or oligonucleotide composition or chirally controlled oligonucleotide composition.
   244. The composition or method of any one of the preceding embodiments, wherein the biologically active agent comprises or consists of or is an oligonucleotide or oligonucleotide composition or chirally controlled oligonucleotide composition, wherein the sequence of the oligonucleotide comprises or consists of the sequence of any oligonucleotide described herein.
   245. The composition or method of any one of the preceding embodiments, wherein the biologically active agent comprises or consists of or is an oligonucleotide or oligonucleotide composition or chirally controlled oligonucleotide composition, wherein the sequence of the oligonucleotide comprises or consists of the sequence of any oligonucleotide listed in Table 4A.
   246. The composition or method of any one of the preceding embodiments, wherein the biologically active agent comprises or consists of or is an oligonucleotide or oligonucleotide composition or chirally controlled oligonucleotide composition, wherein the sequence of the oligonucleotide comprises or consists of the sequence of a splice-switching oligonucleotide.
   247. The composition or method of any one of the preceding embodiments, wherein the biologically active agent comprises or consists of or is an oligonucleotide or oligonucleotide composition or chirally controlled oligonucleotide composition, wherein the sequence of the oligonucleotide comprises or consists of the sequence of an oligonucleotide capable of skipping or mediating skipping of an exon in the dystrophin gene.
   248. The composition or method of any one of the preceding embodiments, wherein the biologically active agent comprises or consists of or is an oligonucleotide or oligonucleotide composition or chirally controlled oligonucleotide composition, wherein the sequence of the oligonucleotide comprises or consists of the sequence of an oligonucleotide capable of skipping or mediating skipping of exon 51 in the dystrophin gene.
   249. The composition or method of any one of the preceding embodiments, wherein the biologically active agent comprises or consists of or is an oligonucleotide or oligonucleotide composition or chirally controlled oligonucleotide composition, wherein the sequence of the oligonucleotide comprises or consists of the sequence of any of: WV-887, WV-896, WV-1709, WV-1710, WV-1714, WV-2095, WV-2100, WV-2106, WV-2107, WV-2108, WV-2109, WV-2223, WV-2224, WV-2225, WV-2226, WV-2227, WV-2228, WV-2229, WV-2230, WV-2438, WV-2444, WV-2445, WV-2526, WV-2527, WV-2528, WV-2529, WV-2530, WV-2531, WV-2533, WV-2578, WV-2580, WV-2587, WV-3047, WV-3152, WV-3472, WV-3473, WV-3507, WV-3508, WV-3509, WV-3510, WV-3511, WV-3512, WV-3513, WV-3514, WV-3515, WV-3545, or WV-3546.
   250. The composition or method of any one of the preceding embodiments, wherein the sequence of an oligonucleotide includes any one or more of: base sequence (including length); pattern of chemical modifications to sugar and base moieties; pattern of backbone linkages; pattern of natural phosphate linkages, phosphorothioate linkages, phosphorothioate triester linkages, and combinations thereof; pattern of backbone chiral centers; pattern of stereochemistry (Rp/Sp) of chiral internucleotidic linkages; pattern of backbone phosphorus modifications; pattern of modifications on the internucleotidic phosphorus atom, such as —S—, and -L-R¹ of formula I.
   251. The composition or method of any one of the preceding embodiments, wherein the muscle cell or tissue is selected from: skeletal muscle, smooth muscle, heart muscle, thoracic diaphragm, gastrocnemius, quadriceps, triceps, and/or heart.
   252. The method of any one of the preceding embodiments, wherein the method delivers the biologically active agent into the cytoplasm of a cell.
   253. The method of any one of the preceding embodiments, wherein the method delivers the biologically active agent into the nucleus of a cell.
   254. The composition or method of any one of the preceding embodiments, wherein the chiral internucleoside linkage is a phosphorothioate.
   255. The composition or method of any one of the preceding embodiments, wherein a common base sequence hybridizes with a transcript of dystrophin, myostatin, Huntingtin, a myostatin receptor, ActRIIB, ActRIIA, DMPK, Malat1, SMN2, dystrophia myotonica protein kinase (DMPK), Proprotein convertase subtilisin/kexin type 9 (PCSK9), SMAD7 or KRT14 (Keratin 14).
   256. The composition or method of any one of the preceding embodiments, wherein the composition delivers the biologically active agent into cells to a level higher than that observed for the biologically active agent absent the lipid.
   257. The composition or method of any one of the preceding embodiments, characterized in that the composition has higher hTLR9 antagonist activity than that observed for the composition absent the lipid.
   258. A method for reducing hTLR9 agonist activities, comprising conjugating a biologically active agent to one or more lipids.
   259. A method for increasing hTLR9 antagonist activities, comprising conjugating a biologically active agent to one or more lipids.
   260. The method of any one of embodiments 258-259, characterized in that the agonist activities are reduced, or the antagonist activities are increased, compared to the biological active agent absent the lipid.
   261. The method of any one of embodiments 258-260, wherein the biological active agent is an oligonucleotides.
   262. The method of any one of embodiments 258-261, wherein the biological active agent is an oligonucleotide of any one of the preceding embodiments.
   263. The method of any one of embodiments 258-262, wherein the lipid is a lipid of any one of the preceding embodiments.
   264. The composition or method of any one of the preceding embodiments, wherein a lipid is conjugated to a biologically active agent via a linker.
   265. The composition or method of any one of the preceding embodiments, wherein the linker is -L^{LD}-.
   266. The composition or method of any one of the preceding embodiments, wherein the linker is -L-.
   267. The composition or method of any one of the preceding embodiments, wherein the linker is —NH—(CH₂)₆—.
   268. The composition or method of any one of the preceding embodiments, wherein the linker is —C(O)—NH—(CH₂)₆—P(O)(O—)—.
   269. The composition or method of any one of the preceding embodiments, wherein the linker is —C(O)—NH—(CH₂)₆—P(O)(S—)—.
   270. The composition of embodiment 268 or 269, wherein the lipid is a fatty acid which is connected to the linker through formation of the amide group —C(O)—NH—, and the oligonucleotide is connected to the linker through formation of a phosphate or phosphorothioate linkage between its 5′-OH or 3′-OH with —P(O)(O—)— or —P(O)(S—)— of the linker.
   271. The composition of embodiment 268 or 269, wherein the lipid is a fatty acid which is connected to the linker through formation of the amide group —C(O)—NH—, and the oligonucleotide is connected to the linker through formation of a phosphate or phosphorothioate linkage between its 5′-OH with —P(O)(O—)— or —P(O)(S—)— of the linker.
   272. The composition of embodiment 268 or 269, wherein the lipid is a fatty acid which is connected to the linker through formation of the amide group —C(O)—NH—, and the oligonucleotide is connected to the linker through formation of a phosphate or phosphorothioate linkage between its 3′-OH with —P(O)(O—)— or —P(O)(S—)— of the linker.
   273. The composition of any one of the preceding embodiments, further comprising one or more targeting components.
   274. A composition comprising a plurality of compounds having the structure of:
[1776] A^{c}-[-L^{LD}-(R^{LD})ₐ]_{b} or [(A^{c})ₐ-L^{LD}]_{b}-R^{LD}, or a salt thereof,
   wherein:
[1777] A^{c} is a biologically active agent;
[1778] a is 1-1000;
[1779] b is 1-1000;
[1780] each L^{LD} is independently a linker moiety; and
[1781] each R^{LD} is independently a lipid moiety or a targeting component, wherein at least one R^{LD} is a lipid moiety.
   275. A composition comprising a plurality of compounds having the structure of:
[1782] A^{c}-[-L^{LD}-(R^{LD})ₐ]_{b} or [(A^{c})ₐ-L^{LD}]_{b}-R^{LD}, or a salt thereof,
   wherein:
[1783] A^{c} is a biologically active agent;
[1784] a is 1-1000;
[1785] b is 1-1000;
[1786] each L^{LD} is independently a covalent bond or an optionally substituted, C₁-C₈₀ saturated or partially unsaturated aliphatic group, wherein one or more methylene units are optionally and independently replaced by T^{L}D or an optionally substituted group selected from C₁-C₆ alkylene, C₁-C₆ alkenylene, —C≡C—, a C₁-C₆ heteroaliphatic moiety, —C(R′)₂—, -Cy-, —O—, —S—, —S—S—, —N(R′)—, —C(O)—, —C(S)—, —C(NR′)—, —C(O)N(R′)—, —N(R′)C(O)N(R′)—, —N(R′)C(O)—, —N(R′)C(O)O—, —OC(O)N(R′)—, —S(O)—, —S(O)₂—, —S(O)₂N(R′)—, —N(R′)S(O)₂—, —SC(O)—, —C(O)S—, —OC(O)—, and —C(O)O—;
[1787] each R^{LD} is independently an optionally substituted, C₁-C₈₀ saturated or partially unsaturated aliphatic group, wherein one or more methylene units are optionally and independently replaced by an optionally substituted group selected from C₁-C₆ alkylene, C₁-C₆ alkenylene, —CC, a C₁-C₆ heteroaliphatic moiety, —C(R′)₂—, -Cy-, —O—, —S—, —S—S—, —N(R′)—, —C(O)—, —C(S)—, —C(NR′)—, —C(O)N(R′)—, —N(R′)C(O)N(R′)—, —N(R′)C(O)—, —N(R′)C(O)O—, —OC(O)N(R′)—, —S(O)—, —S(O)₂—, —S(O)₂N(R′)—, —N(R′)S(O)₂—, —SC(O)—, —C(O)S—, —OC(O)—, and —C(O)O—;
[1788] T^{LD} has the structure of:

[chemical structure]

[1789] W is O, S or Se;
[1790] each of X, Y and Z is independently —O—, —S—, —N(-L-R′)—, or L;
[1791] L is a covalent bond or an optionally substituted, linear or branched C₁-C₁₀ alkylene, wherein one or more methylene units of L are optionally and independently replaced by an optionally substituted group selected from C₁-C₆ alkylene, C₁-C₆ alkenylene, —C≡C—, a C₁-C₆ heteroaliphatic moiety, —C(R′)₂—, -Cy-, —O—, —S—, —S—S—, —N(R′)—, —C(O)—, —C(S)—, —C(NR′)—, —C(O)N(R′)—, —N(R′)C(O)N(R′)—, —N(R′)C(O)—, —N(R′)C(O)O—, —OC(O)N(R′)—, —S(O)—, —S(O)₂—, —S(O)₂N(R′)—, —N(R′)S(O)₂— —SC(O)—, —C(O)S—, —OC(O)—, and —C(O)O—;
[1792] R¹ is halogen, R, or an optionally substituted C₁-C₅₀ aliphatic wherein one or more methylene units are optionally and independently replaced by an optionally substituted group selected from C₁-C₆ alkylene, C₁-C₆ alkenylene, —C≡C—, a C₁-C₆ heteroaliphatic moiety, —C(R′)₂—, -Cy-, —O—, —S—, —S—S—, —N(R′)—, —C(O)—, —C(S)—, —C(NR′)—, —C(O)N(R′)—, —N(R′)C(O)N(R′)—, —N(R′)C(O)—, —N(R′)C(O)O—, —OC(O)N(R′)—, —S(O)—, —S(O)₂—, —S(O)₂N(R′)—, —N(R′)S(O)₂— —SC(O)—, —C(O)S—, —OC(O)—, and —C(O)O—
[1793] each R′ is independently —R, —C(O)R, —CO₂R, or —SO₂R, or:
   [1794] two R′ are taken together with their intervening atoms to form an optionally substituted aryl, carbocyclic, heterocyclic, or heteroaryl ring;
[1795] -Cy- is an optionally substituted bivalent ring selected from phenylene, carbocyclylene, arylene, heteroarylene, and heterocyclylene; and
[1796] each R is independently hydrogen, or an optionally substituted group selected from C₁-C₆ aliphatic, carbocyclyl, aryl, heteroaryl, and heterocyclyl.
   276. The composition of any one of embodiments 274-275, wherein A^{c} is an oligonucleotide chain ([H]_{b}-A^{c} is an oligonucleotide).
   277. The composition or method of any one of embodiments 1-273, wherein the composition is a composition of any one of embodiments 274-276.
   278. The composition or method of any one of embodiments 274-277, wherein the oligonucleotides or oligonucleotides have the structure of A^{c}-[-L^{LD}-(R^{LD})ₐ]_{b}.
   279. The composition or method of any one of embodiments 274-277, wherein the oligonucleotides or oligonucleotides have the structure of [(A^{c})ₐ-L^{LD}]_{b}-R^{LD}.
   280. The composition or method of any one of embodiments 274-279, wherein L^{LD}, R^{LD} combinations of L^{LD} and R^{LD}, or -[-L^{LD}-(R^{LD})ₐ]_{b} comprises one or more lipid moieties.
   281. The composition or method of any one of embodiments 274-279, wherein -[-L^{LD}-(R^{LD})ₐ]_{b} comprises one or more lipid moieties.
   282. The composition or method of any one of embodiments 274-280, wherein R^{LD} comprises one or more lipid moieties.
   283. The composition or method of any one of embodiments 274-279, wherein L^{LD}, R^{LD} combinations of L^{LD} and R^{LD}, or -[-L^{LD}-(R^{LD})ₐ]_{b} comprises one or more targeting components.
   284. The composition or method of any one of embodiments 274-279, wherein -[-L^{LD}-(R^{LD})ₐ]_{b} comprises one or more targeting components.
   285. The composition or method of any one of embodiments 274-280, wherein R^{LD} comprises one or more targeting components.
   286. The composition or method of any one of embodiments 274-285, wherein b is 1.
   287. The composition or method of any one of embodiments 274-286, wherein a is 1.
   288. The composition or method of any one of embodiments 274-287, wherein A^{c} comprises one or more modified base, sugar, or internucleotidic linkage moieties.
   289. The composition or method of any one of embodiments 274-288, wherein A^{c} comprises one or more chiral internucleotidic linkages.
   290. The composition or method of any one of embodiments 274-289, wherein A^{c} comprises one or more chiral internucleotidic linkages, and each chiral internucleotidic linkage of A^{c} is chirally controlled.
   291. The composition or method of any one of embodiments 274-290, wherein oligonucleotides having the structure of A^{c}-[-L^{LD}-(R^{LD})ₐ]_{b}, or [(A^{c})ₐ-L^{LD}]_{b}-R^{LD}, are of a particular type defined by the 1) base sequence; 2) pattern of backbone linkages; 3) pattern of backbone chiral centers; and 4) pattern of backbone phosphorus modifications of A.
   292. The composition or method of any one of embodiments 274-287, wherein A^{c} is the oligonucleotide chain of any one of the preceding embodiments.
   293. The composition or method of any one of embodiments 274-292, wherein A^{c} is an oligonucleotide of any one of the preceding embodiments, connecting to L^{LD} through a hydroxyl group of a sugar moiety (—O—).
   294. The composition or method of any one of embodiments 274-293, wherein A^{c} is an oligonucleotide of any one of the preceding embodiments, connecting to L^{LD} through its 5′-O—.
   295. The composition or method of any one of embodiments 274-292, wherein A^{c} is an oligonucleotide of any one of the preceding embodiments, connecting to L^{LD} through a nucleobase.
   296. The composition or method of any one of embodiments 274-292, wherein A^{c} is an oligonucleotide of any one of the preceding embodiments, connecting to L^{LD} through an internucleotidic linkage.
   297. The composition or method of any one of embodiments 274-294, wherein A^{c} is an oligonucleotide selected from any of the Tables and connected to L^{LD} and R^{LD} ([H]_{b}-A^{c} is an oligonucleotide selected from any of the Tables).
   298. The composition or method of any one of embodiments 274-294, wherein A^{c} is WV-887 connected to L^{LD} and R^{LD} ([H]_{b}-A^{c} is WV-887).
   299. The composition or method of any one of embodiments 274-294, wherein A^{c} is WV-892 connected to L^{LD} and R^{LD}.
   300. The composition or method of any one of embodiments 274-294, wherein A^{c} is WV-896 connected to L^{LD} and R^{LD}.
   301. The composition or method of any one of embodiments 274-294, wherein A^{c} is WV-1714 connected to L^{LD} and R^{LD}.
   302. The composition or method of any one of embodiments 274-294, wherein A^{c} is WV-2444 connected to L^{LD} and R^{LD}.
   303. The composition or method of any one of embodiments 274-294, wherein A^{c} is WV-2445 connected to L^{LD} and R^{LD}.
   304. The composition or method of any one of embodiments 274-294, wherein A^{c} is WV-2526 connected to L^{LD} and R^{LD}.
   305. The composition or method of any one of embodiments 274-294, wherein A^{c} is WV-2527 connected to L^{LD} and R^{LD}.
   306. The composition or method of any one of embodiments 274-294, wherein A^{c} is WV-2528 connected to L^{LD} and R^{LD}.
   307. The composition or method of any one of embodiments 274-294, wherein A^{c} is WV-2530 connected to L^{LD} and R^{LD}.
   308. The composition or method of any one of embodiments 274-294, wherein A^{c} is WV-2531 connected to L^{LD} and R^{LD}.
   309. The composition or method of any one of embodiments 274-294, wherein A^{c} is WV-2578 connected to L^{LD} and R^{LD}.
   310. The composition or method of any one of embodiments 274-294, wherein A^{c} is WV-2580 connected to L^{LD} and R^{LD}.
   311. The composition or method of any one of embodiments 274-294, wherein A^{c} is WV-2587 connected to L^{LD} and R^{LD}.
   312. The composition or method of any one of embodiments 274-294, wherein A^{c} is WV-3047 connected to L^{LD} and R^{LD}.
   313. The composition or method of any one of embodiments 274-294, wherein A^{c} is WV-3152 connected to L^{LD} and R^{LD}.
   314. The composition or method of any one of embodiments 274-294, wherein A^{c} is WV-3472 connected to L^{LD} and R^{LD}.
   315. The composition or method of any one of embodiments 274-294, wherein A^{c} is WV-3473 connected to L^{LD} and R^{LD}.
   316. The composition or method of any one of embodiments 274-294, wherein A^{c} is WV-3507 connected to L^{LD} and R^{LD}.
   317. The composition or method of any one of embodiments 274-294, wherein A^{c} is WV-3508 connected to L^{LD} and R^{LD}.
   318. The composition or method of any one of embodiments 274-294, wherein A^{c} is WV-3509 connected to L^{LD} and R^{LD}.
   319. The composition or method of any one of embodiments 274-294, wherein A^{c} is WV-3510 connected to L^{LD} and R^{LD}.
   320. The composition or method of any one of embodiments 274-294, wherein A^{c} is WV-3511 connected to L^{LD} and R^{LD}.
   321. The composition or method of any one of embodiments 274-294, wherein A^{c} is WV-3512 connected to L^{LD} and R^{LD}.
   322. The composition or method of any one of embodiments 274-294, wherein A^{c} is WV-3513 connected to L^{LD} and R^{LD}.
   323. The composition or method of any one of embodiments 274-294, wherein A^{c} is WV-3514 connected to L^{LD} and R^{LD}.
   324. The composition or method of any one of embodiments 274-294, wherein A^{c} is WV-3515 connected to L^{LD} and R^{LD}.
   325. The composition or method of any one of embodiments 274-324, wherein L^{LD} is an optionally substituted, C₁-C₁₀ saturated or partially unsaturated aliphatic group, wherein one or more methylene units are optionally and independently replaced by T^{LD} or an optionally substituted group selected from C₁-C₆ alkylene, C₁-C₆ alkenylene, —C—, a C₁-C₆ heteroaliphatic moiety, —C(R′)₂—, -Cy-, —O—, —S—, —S—S—, —N(R′)—, —C(O)—, —C(S)—, —C(NR′)—, —C(O)N(R′)—, —N(R′)C(O)N(R′)—, —N(R′)C(O)—, —N(R′)C(O)O—, —OC(O)N(R′)—, —S(O)—, —S(O)₂—, —S(O)₂N(R′)—, —N(R′)S(O)₂—, —SC(O)—, —C(O)S—, —OC(O)—, and —C(O)O—.
   326. The composition or method of any one of embodiments 274-324, wherein L^{LD} is an optionally substituted, C₁-C₁₀ saturated or partially unsaturated aliphatic group, wherein one or more methylene units are optionally and independently replaced by an optionally substituted group selected from C₁-C₆ alkylene, C₁-C₆ alkenylene, —C≡C—, -Cy-, —O—, —S—, —N(R′)—, —C(O)—, —C(O)N(R′)—, —N(R′)C(O)N(R′)—, —OC(O)N(R′)—, —S(O)—, —S(O)₂—, —S(O)₂N(R′)—, and —C(O)O—, or T^{L}D wherein W is O or S, each of Y and Z is independently —O—, —S—, or -L-.
   327. The composition or method of any one of embodiments 274-324, wherein L^{L}D is an optionally substituted, C₁-C₁₀ saturated or partially unsaturated aliphatic group, wherein one or more methylene units are optionally and independently replaced by an optionally substituted group selected from C₁-C₆ alkylene, C₁-C₆ alkenylene, —C≡C—, -Cy-, —O—, —S—, —N(R′)—, —C(O)—, —C(O)N(R′)—, —N(R′)C(O)N(R′)—, —OC(O)N(R′)—, —S(O)—, —S(O)₂—, —S(O)₂N(R′)—, and —C(O)O—, or T^{LD} wherein W is O or S, each of X and Y is independently —O—, —S—, or -L-, and Z is a covalent bond.
   328. The composition or method of any one of embodiments 274-326, wherein L^{LD} connects to a hydroxyl group of A^{c}.
   329. The composition or method of any one of embodiments 274-326, wherein L^{LD} connects to 5′-OH of A^{c}.
   330. The composition or method of any one of embodiments 274-326, wherein L^{LD} connects to 3′-OH of A^{c}.
   331. The composition or method of any one of the preceding embodiments, wherein each R′ is independently —R, —C(O)R, —CO₂R, or —SO₂R, or:

[1797] two R′ are taken together with their intervening atoms to form an optionally substituted C₃-C₁₄ monocyclic, bicyclic or polycyclic aryl, carbocyclic, heterocyclic, or heteroaryl ring having 0-10 heteroatoms.

332. The composition or method of any one of the preceding embodiments, wherein -Cy- is an optionally substituted bivalent ring selected from C₃-C₁₄ monocyclic, bicyclic or polycyclic carbocyclylene, arylene, heteroarylene, and heterocyclylene having 0-10 heteroatoms.
333. The composition or method of any one of the preceding embodiments, wherein each R is independently hydrogen, or an optionally substituted group selected from C₁-C₆ aliphatic, and C₃-C₁₄ monocyclic, bicyclic or polycyclic aryl, carbocyclic, heterocyclic, or heteroaryl ring having 0-10 heteroatoms.
334. The composition or method of any one of embodiments 274-326, wherein L^{LD} is T^{LD}.
335. The composition or method of any one of embodiments 274-326, wherein L^{LD} is —NH—(CH₂)₆-T^{LD}-.
336. The composition or method of any one of embodiments 274-326, wherein L^{LD} is —C(O)—NH—(CH₂)₆-T^{LD}-.
337. The composition or method of embodiment 336, wherein —C(O)— is connected to —R^{LD}.
338. The composition or method of any one of embodiments 274-337, wherein T^{LD} is connected to 5′-O— or 3′-O— of A^{c}.
339. The composition or method of any one of embodiments 274-338, wherein T^{LD} is connected to 5′-O— of A^{c}.
340. The composition or method of any one of embodiments 274-338, wherein T^{LD} is connected to 3′-O— of A^{c}.
341. The composition or method of any one of embodiments 274-340, wherein T^{LD} forms a phosphorothioate linkage with 5′-O— or 3′-O— of A^{c}.
342. The composition or method of embodiment 341, wherein a phosphorothioate linkage is chirally controlled and is Sp.
343. The composition or method of embodiment 341, wherein a phosphorothioate linkage is chirally controlled and is Rp.
344. The composition or method of any one of embodiments 274-340, wherein T^{LD} forms a phosphate linkage with 5′-O— or 3′-O— of A^{c}.
345. The composition or method of any one of embodiments 274-324, wherein L^{LD} is a covalent bond.
346. The composition or method of any one of the preceding embodiments, R^{LD} is an optionally substituted, C₁₀-C₈₀ saturated or partially unsaturated aliphatic group, wherein one or more methylene units are optionally and independently replaced by an optionally substituted group selected from C₁-C₆ alkylene, C₁-C₆ alkenylene, —C≡C—, a C₁-C₆ heteroaliphatic moiety, —C(R′)₂—, -Cy-, —O—, —S—, —S—S—, —N(R′)—, —C(O)—, —C(S)—, —C(NR′)—, —C(O)N(R′)—, —N(R′)C(O)N(R′)—, —N(R′)C(O)—, —N(R′)C(O)O—, —OC(O)N(R′)—, —S(O)—, —S(O)₂—, —S(O)₂N(R′)—, —N(R′)S(O)₂—, —SC(O)—, —C(O)S—, —OC(O)—, and —C(O)O—.
347. The composition or method of any one of the preceding embodiments, wherein R^{LD} is an optionally substituted, C₁₀-C₈₀ saturated or partially unsaturated aliphatic group, wherein one or more methylene units are optionally and independently replaced by —C(O)—.
348. The composition or method of any one of the preceding embodiments, wherein R^{LD} is an optionally substituted, C₁₀-C₆₀ saturated or partially unsaturated aliphatic group, wherein one or more methylene units are optionally and independently replaced by —C(O)—.
349. The composition or method of any one of the preceding embodiments, wherein R^{LD} is an optionally substituted, C₁₀-C₄₀ saturated or partially unsaturated aliphatic group, wherein one or more methylene units are optionally and independently replaced by —C(O)—.
350. The composition or method of any one of the preceding embodiments, wherein R^{LD} comprises 10, 11, 12, 13, 14, 15, 16, 17, 18, 19, 20, 21, 22, 23, 24, 25, 26, 27, 28, 29, 30 or more carbon atoms.
351. The composition or method of any one of the preceding embodiments, wherein at least one R^{LD} comprises or is a targeting component.
352. The composition or method of any one of the preceding embodiments, wherein at least one R^{LD} is a targeting component.
353. The composition or method of any one of the preceding embodiments, wherein at least one R^{LD} comprises a lipid moiety.
354. The composition or method of any one of the preceding embodiments, wherein at least one R^{LD} is a lipid moiety.
355. The composition or method of any one of the preceding embodiments, wherein R^{LD} is an optionally substituted, C₁₀-C₈₀ saturated or partially unsaturated aliphatic group.
356. The composition or method of any one of the preceding embodiments, wherein R^{LD} is an optionally substituted, C₁₀-C₆₀ saturated or partially unsaturated aliphatic group.
357. The composition or method of any one of the preceding embodiments, wherein R^{LD} is an optionally substituted, C₁₀-C₄₀ saturated or partially unsaturated aliphatic group.
358. The composition or method of any one of the preceding embodiments, wherein R^{LD} is unsubstituted linear or branched C₁₀-C₈₀ aliphatic group.
359. The composition or method of any one of the preceding embodiments, wherein R^{LD} is unsubstituted linear or branched C₁₀-C₆₀ aliphatic group.
360. The composition or method of any one of the preceding embodiments, wherein R^{LD} is unsubstituted linear or branched C₁₀-C₄₀ aliphatic group.
361. The composition or method of any one of embodiments 274-360, wherein R^{LD} is palmityl.
362. The composition or method of any one of the preceding embodiments 274-360, wherein R^{LD} is

[chemical structure]

363. The composition or method of any one of embodiments 274-360, wherein R^{LD} is lauryl.
364. The composition or method of any one of embodiments 274-360, wherein R^{LD} is myristyl.
365. The composition or method of any one of embodiments 274-360, wherein R^{LD} is stearyl.
366. The composition or method of any one of embodiments 274-360, wherein R^{LD} is

[chemical structure]

367. The composition or method of any one of embodiments 274-360, wherein R^{LD} is

[chemical structure]

368. The composition or method of any one of embodiments 274-360, wherein R^{LD} is

[chemical structure]

369. The composition or method of any one of embodiments 274-360, wherein R^{LD} is

[chemical structure]

370. The composition or method of any one of embodiments 274-360, wherein R^{LD} is

[chemical structure]

371. The composition or method of any one of embodiments 274-360, wherein R^{LD} is

[chemical structure]

372. The composition or method of any one of embodiments 274-354, wherein R^{LD} is

[chemical structure]

373. The composition or method of any one of embodiments 274-354, wherein R^{LD} is

[chemical structure]

374. The composition or method of any one of embodiments 274-354, wherein R^{LD} is

[chemical structure]

375. The composition or method of any one of embodiments 274-354, wherein R^{LD} is

[chemical structure]

376. The composition or method of any one of embodiments 274-354, wherein R^{LD} is

[chemical structure]

377. The composition or method of any one of embodiments 274-354, wherein R^{LD} is

[chemical structure]

378. The composition or method of any one of embodiments 274-354, wherein R^{LD} is

[chemical structure]

379. The composition or method of any one of embodiments 274-354, wherein R^{LD} is

[chemical structure]

380. The composition or method of any one of embodiments 274-354, wherein R^{LD} is

[chemical structure]

381. The composition or method of any one of embodiments 274-354, wherein R^{LD} is

[chemical structure]

382. The composition or method of any one of embodiments 274-354, wherein R^{LD} is

[chemical structure]

383. The composition or method of any one of embodiments 274-354, wherein R^{LD} is

[chemical structure]

384. The composition or method of any one of embodiments 274-354, wherein R^{LD} is

[chemical structure]

385. The composition or method of any one of embodiments 274-354, wherein R^{LD} is

[chemical structure]

386. The composition or method of any one of embodiments 274-354, wherein R^{LD} is

[chemical structure]

387. The composition or method of any one of embodiments 274-354, wherein R^{LD} is

[chemical structure]

388. The composition or method of any one of embodiments 274-354, wherein R^{LD} is

[chemical structure]

389. The composition or method of any one of embodiments 274-354, wherein R^{LD} is

[chemical structure]

390. The composition or method of any one of embodiments 274-354, wherein R^{LD} is

[chemical structure]

391. The composition or method of any one of embodiments 274-354, wherein R^{LD} is

[chemical structure]

392. The composition or method of any one of embodiments 274-354, wherein R^{LD} is

[chemical structure]

393. The composition or method of any one of embodiments 274-354, wherein R^{LD} is

[chemical structure]

394. The composition or method of any one of embodiments 274-354, wherein R^{LD} is

[chemical structure]

395. The composition or method of any one of embodiments 274-354, wherein R^{LD} is

[chemical structure]

396. The composition or method of any one of embodiments 274-354, wherein R^{LD} is

[chemical structure]

397. The composition or method of any one of embodiments 274-354, wherein -[-L^{LD}-(R^{LD})ₐ]_{b} is

[chemical structure]

398. The composition or method of any one of embodiments 274-354, wherein -[-L^{LD}-(R^{LD})ₐ]_{b} is

[chemical structure]

399. The composition or method of any one of embodiments 274-354, wherein

[chemical structure]

400. The composition or method of any one of embodiments 274-354, wherein -[-L^{LD}-(R^{LD})ₐ]_{b} is

[chemical structure]

401. The composition or method of any one of embodiments 274-354, wherein -[-L^{LD}-(R^{LD})ₐ]_{b} is

[chemical structure]

402. The composition or method of any one of embodiments 274-354, wherein -[-L^{LD}-(R^{LD})ₐ]_{b} is

[chemical structure]

403. The composition or method of any one of embodiments 274-354, wherein -[-L^{LD}-(R^{LD})ₐ]_{b} is

[chemical structure]

404. The composition or method of any one of embodiments 274-354, wherein -[-L^{LD}-(R^{LD})ₐ]_{b} is

[chemical structure]

405. The composition or method of any one of embodiments 274-354, wherein -[-L^{LD}-(R^{LD})ₐ]_{b} is

[chemical structure]

406. The composition or method of any one of embodiments 274-354, wherein -[-L^{LD}-(R^{LD})ₐ]_{b} is

[chemical structure]

407. The composition or method of any one of embodiments 274-354, wherein -[-L^{LD}-(R^{LD})ₐ]_{b} is

[chemical structure]

408. The composition or method of any one of embodiments 274-354, wherein -[-L^{LD}(R^{LD})ₐ]_{b} is

[chemical structure]

409. The composition or method of any one of embodiments 274-354, wherein -[-L^{LD}-(R^{LD})ₐ]_{b} is

[chemical structure]

410. The composition or method of any one of embodiments 274-354, wherein -[-L^{LD}-(R^{LD})ₐ]_{b} is

[chemical structure]

411. The composition or method of any one of embodiments 274-354, wherein -[-L^{LD}-(R^{LD})ₐ]_{b} is

[chemical structure]

412. The composition or method of any one of embodiments 382-411, wherein X is O.
413. The composition or method of any one of embodiments 382-411, wherein X is S.
414. The composition or method of embodiment 412, wherein —O—P(O)(X⁻)— connects to 5′-O— of A^{c} to form a phosphate linkage.
415. The composition or method of embodiment 412, wherein —O—P(O)(X⁻)— connects to 3′-O— of A^{c} to form a phosphate linkage.
416. The composition or method of embodiment 413, wherein —O—P(O)(X⁻)— connects to 5′-O— of A^{c} to form a phosphorothioate linkage.
417. The composition or method of embodiment 413, wherein —O—P(O)(X⁻)— connects to 3′-O— of A^{c} to form a phosphorothioate linkage.
418. The composition or method of embodiment 416 or 417, wherein the phosphorothioate linkage is chirally controlled.
419. The composition or method of embodiment 416 or 417, wherein the phosphorothioate linkage is chirally controlled and is Sp.
420. The composition or method of embodiment 416 or 417, wherein the phosphorothioate linkage is chirally controlled and is Rp.
421. The composition or method of any one of the preceding embodiments, wherein at least 0.5%, 1%, 2%, 3%, 4%, 5%, 6%, 7%, 8%, 9%, 10%, 20%, 30%, 40%, 50%, 60%, 70%, 75%, 80%, 81%, 82%, 83%, 84%, 85%, 86%, 87%, 88%, 89%0, 90%, 91%, 92%, 93%, 94%, 95%, 96%, 97%, 97% or 99% of the oligonucleotides that have the base sequence of the particular oligonucleotide type, defined by 1) base sequence; 2) pattern of backbone linkages; 3) pattern of backbone chiral centers; and 4) pattern of backbone phosphorus modifications, are oligonucleotides of the particular oligonucleotide type.
422. The composition or method of any one of the preceding embodiments, wherein at least 10% of the oligonucleotides that have the base sequence of the particular oligonucleotide type, defined by 1) base sequence; 2) pattern of backbone linkages; 3) pattern of backbone chiral centers; and 4) pattern of backbone phosphorus modifications, are oligonucleotides of the particular oligonucleotide type.
423. The composition or method of any one of the preceding embodiments, wherein at least 0.5%, 1%, 2%, 3%, 4%, 5%, 6%, 7%, 8%, 9%, 10%, 20%, 30%, 40%, 50%, 60%, 70%, 75%, 80%, 81%, 82%, 83%, 84%, 85%, 86%, 87%, 88%, 89%0, 90%, 91%, 92%, 93%, 94%, 95%, 96%, 97%, 97% or 99% of the oligonucleotides that have the base sequence, pattern of backbone linkages, and pattern of backbone phosphorus modifications of the particular oligonucleotide type, defined by 1) base sequence; 2) pattern of backbone linkages; 3) pattern of backbone chiral centers; and 4) pattern of backbone phosphorus modifications, are oligonucleotides of the particular oligonucleotide type.
424. The composition or method of any one of the preceding embodiments, wherein at least 10% of the oligonucleotides that have the base sequence, pattern of backbone linkages, and pattern of backbone phosphorus modifications of the particular oligonucleotide type, defined by 1) base sequence; 2) pattern of backbone linkages; 3) pattern of backbone chiral centers; and 4) pattern of backbone phosphorus modifications, are oligonucleotides of the particular oligonucleotide type.
425. The composition or method of any one of the preceding embodiments, wherein the composition is a pharmaceutical composition comprising one or more pharmaceutically acceptable salts of the oligonucleotides.
426. The composition or method of any one of the preceding embodiments, wherein the composition is a pharmaceutical composition comprising one or more sodium salts of the oligonucleotides.
427. The composition or method of any one of the proceeding embodiments, wherein the composition further comprises one or more other therapeutic agents.
428. A method of generating a set of spliced products from a target transcript, the method comprising steps of:

[1798] contacting a splicing system containing the target transcript with an oligonucleotide composition of one of the previous embodiments in an amount, for a time, and under conditions sufficient for a set of spliced products to be generated that is different from a set generated under reference conditions selected from the group consisting of absence of the composition, presence of a reference composition, and combinations thereof.

429. A method for treating a disease, comprising administering to a subject a composition of any one of the preceding embodiments.
430. The method of any one of the preceding embodiments, wherein the disease is Duchenne muscular dystrophy.
431. A method of identifying and/or characterizing an oligonucleotide composition, the method comprising steps of:

[1799] providing at least one composition of any one of the preceding embodiments;

[1800] assessing splicing pattern of a transcript relative to a reference composition.

432. An oligonucleotide described in any one of the preceding embodiments or a salt thereof.

### EXAMPLES

[1801] Non-limiting examples are provided below. A person of ordinary skill in the art appreciates that other compositions and methods can similarly be prepared and performed in accordance with the present disclosure.

### Example 1. Synthesis of turbinaric acid and 2-cyanoethyl ((6Z,9Z,28Z,31Z)-heptatriaconta-6,9,28,31-tetraen-19-yl) diisopropylphosphoramidite

[chemical structure]

[1803] Synthesis of Turbinaric Acid: (4E,8E,12E,16E)-4,8,13,17,21-pentamethyldocosa-4,8,12,16,20-pentaenoic acid. First-step, synthesis of 2-hydroxy-3-bromosqualene. To a solution of squalene (30.03 g, 73.1 mmol) in THE (210 mL), water (35 mL) was added and then a small amount of THE was added dropwise to obtain a clear solution under Argon. N-bromosuccinimide (15.62 g, 88 mmol) was added portion-wise at 0° C. and the reaction mixture was stirred at 0° C. for 30 minutes and at room temperature for 3 hrs. The solvent was removed under reduced pressure, and brine (500 mL) was added and extracted with EtOA (100 mL×5). The organic layer was dried over anhydrous sodium sulfate and concentrated to give a residue, which was purified by ISCO (220 g gold silica gel cartridge) eluting with hexane to 50% EtOAc in hexane (product was come out at 10-20% EtOAc in hexane) to give 2-hydroxy-3-bromosqualene (9.92 g, 19.54 mmol, 26.7% yield) as a pale yellowish oil. ¹H NMR (400 MHz, Chloroform-d) δ 5.24-5.05 (m, 5H), 3.98 (dd, J=11.3, 1.9 Hz, 1H), 2.35-2.32 (m, 1H), 2.16-1.90 (m, 18H), 1.85-1.70 (m, 1H), 1.67 (d, J=1.4 Hz, 3H), 1.60 (bs, 15H), 1.34 (s, 3H), 1.32 (s, 3H). MS (ESI), 551.1 and 553.3 (M+HCOO)⁻.

[1804] Second step, synthesis of 2,2-dimethyl-3-((3E,7E,11E,15E)-3,7,12,16,20-pentamethylhenicosa-3,7,11,15,19-pentaen-1-yl)oxirane. To a solution of 2-hydroxy-3-bromosqualene (9.72 g, 19.15 mmol) in MeOH (360 mL), K₂CO₃ (5.29 g, 38.3 mmol) was added and the reaction mixture was stirred at room temperature for 2 hrs, filtered and then concentrated under reduced pressure. Then 300 mL EtOAc was added, and filtered, concentrated to give 2,3-oxidosqualene (8.38 g, 19.64 mmol, 100% yield) a colorless oil. ¹H NMR (400 MHz, Chloroform-d) δ 5.20-5.04 (m, 5H), 2.70 (t, J=7.0 Hz, 1H), 2.20-1.95 (m, 20H), 1.67 (s, 3H), 1.61 (s, 3H), 1.59 (bs, 15H), 1.29 (s, 3H), 1.25 (s, 3H).

[1805] Third step, synthesis of (4E,8E,12E,16E)-4,8,13,17,21-pentamethyldocosa-4,8,12,16,20-pentaenal. To a solution of periodic acid (7.79 g, 34.2 mmol) in water (28 mL) at 0° C., a solution of 2,3-oxidosqualene (8.10 g, 18.98 mmol) in dioxane (65 mL) was added. The reaction mixture was stirred at room temperature for 2 hrs. Water (150 mL) was added and extracted with EtOAc (3×100 mL). The organic layer are dried over anhydrous sodium sulfate and concentrated under reduced pressure to give a residue, which was purified by ISCO (120 g gold silica gel cartridge) eluting with hexane to 10% EtOAc in hexane (product come out at 5-7% EtOAc in hexane to give (4E,8E,12E,16E)-4,8,13,17,21-pentamethyldocosa-4,8,12,16,20-pentaenal (5.80 g, 15.08 mmol, 79% yield) as a colorless oil. ¹H NMR (400 MHz, Chloroform-d) δ 9.74 (t, J=2.0 Hz, 1H), 5.18-5.04 (m, 5H), 2.50 (td, J=7.5, 2.0 Hz, 2H), 2.31 (t, J=7.5 Hz, 2H), 2.13-1.92 (m, 16H), 1.67 (s, 3H), 1.61 (s, 3H), 1.59 (bs, 12H).

[1806] Fourth Step, synthesis of turbinaric Acid. Sulfuric acid (8.2 mL) followed by sodium dichromate dihydrate (4.42 g, 14.82 mmol) was added to HPLC water (80 mL) at 0° C. The above chromic acid solution was added dropwise to a solution of (4Z,8Z,12E,16E)-4,8,13,17,21-pentamethyldocosa-4,8,12,16,20-pentaenal (5.70 g, 14.82 mmol) in ethyl ether (115 mL) at 0° C. The reaction mixture was stirred at 0° C. for 2 hrs. After 2 hrs, TLC showed the reaction was complete (3:1 hexane/EtOAc). The reaction mixture was diluted with EtOAc (300 mL), washed with brine (100 mL×4), dried over a hydrous, concentrated to give a residue, which was purified by ISCO (80 g silica gel cartridge) eluting with DCM to 5% MeOH in DCM to give turbinaric acid as a colorless oil (5.00 g, 84% yield). ¹H NMR (400 MHz, Chloroform-d) δ 5.18-5.07 (m, 5H), 2.44 (t, J=6.5 Hz, 2H), 2.30 (t, J=7.7 Hz, 2H), 2.13-1.93 (m, 16H), 1.67 (s, 3H), 1.59 (bs, 15H); MS (ESI), 399.3 (M−H)⁻.

### Example 2. Synthesis of 2-cyanoethyl ((6Z,9Z,28Z,31Z)-heptatriaconta-6,9,28,31-tetraen-19-yl) diisopropylphosphoramidite

[chemical structure]

[1808] Synthesis of 2-cyanoethyl ((6Z,9Z,28Z,31Z)-heptatriaconta-6,9,28,31-tetraen-19-yl) diisopropylphosphoramidite. First-step, synthesis of (9Z,12Z)-octadeca-9,12-dien-1-yl methanesulfonate (or linoleyl methanesulfonate). To a solution of linoleyl alcohol (23.31 ml, 75 mmol) and triethylamine (13.60 ml, 98 mmol) in DCM (150 mL) at 0° C. was added methanesulfonyl chloride (6.39 ml, 83 mmol) dropwise. The reaction mixture was stirred at 0° C. for 30 minutes and at room temperature for 3 hrs. The reaction mixture was diluted with DCM (200 mL), washed with water, sat sodium bicarbonate and brine and dried over a hydrous sodium sulfate. Solvent was concentrated to give linoleyl methanesulfonate (26.17 g, 100% yield) as an yellowish oil. Without further purification, directly use for next step. ¹H NMR (500 MHz, Chloroform-d) δ 5.30-5.41 (m, 4H), 4.22 (t, J=6.6 Hz, 2H), 2.99 (s, 3H), 2.77 (t, J=6.7 Hz, 2H), 2.05 (q, J=6.9 Hz, 4H), 1.74 (p, J=6.7 Hz, 2H), 1.43-1.25 (m, 16H), 0.89 (t, J=6.7 Hz, 3H).

[1809] Second-step, synthesis of linoleyl bromide. To a solution of linoleyl methanesulfonate (26 g, 75 mmol) in ether (800 mL) was added Magnesium bromide ethyl etherate (58.5 g, 226 mmol) under Argon. The reaction mixture was stirred at room temperature for 2 hrs. TLC showed the reaction was not completed. Additional magnesium bromide ethyl etherate (14.5 g) was added the reaction mixture and the reaction mixture was stirred at room temperature for 22 hrs. TLC showed the reaction was complete (9/1 hexane/EtOAc). The reaction mixture was filtered, washed with ether (200 mL), hexane (100 mL), concentrated under reduced pressure to give a residue, which was purified by ISCO (200 g gold silica gel cartridge) eluted with hexane to 10% EtOAc in hexane to give linoleyl bromide (22.8 g, 69.2 mmol, 92% yield) as a colorless oil. ¹H NMR (500 MHz, Chloroform-d) δ 5.42-5.31 (m, 4H), 3.41 (t, J=6.9 Hz, 2H), 2.77 (t, J=6.6 Hz, 2H), 2.05 (q, J=6.9 Hz, 4H), 1.85 (p, J=6.9 Hz, 2H), 1.43-1.25 (m, 16H), 0.89 (t, J=6.8 Hz, 3H).

[1810] Third-step, synthesis of dilinoleyl methanol. To a suspension of Mg (0.897 g, 36.9 mmol) and ether (20 mL) in RB flask was added linoleyl bromide (10.0 g, 30.4 mmol) in ether (25 mL) dropwise while keeping the reaction under gentle reflux by cooling the RB flask in water. The reaction mixture was stirred at 35° C. for 1 hour. To the above reaction mixture at 0° C. was added ethyl formate (1.013 g, 13.68 mmol) in ether (30 mL) dropwise for 10 minutes and the reaction mixture was stirred at room temperature for 1.5 hrs. The reaction mixture was cooled in ice bath, quenched with water (30 mL), treated with 10% H₂SO₄ (150 mL) until the solution became homogeneous and the layer was separated. The aqueous layer was extracted with ether (200 mL×2). The solvent was evaporated under reduced pressure to give a residue, which was re-dissolved in THE (50 mL) and 1 N NaOH (30 mL). The reaction mixture was stirred at 40° C. for 5 hrs. TLC showed the reaction was not complete. 1.5 g NaOH was added to the reaction mixture and the reaction mixture was continually stirred at 40° C. for overnight. The reaction mixture was extracted with ether (2×), dried over a hydrous sodium sulfate, concentrated to give a residue, which was purified by ISCO (120 g gold silica gel cartridge) eluting with hexane to 10% EtOAc in hexane to give dilinoleyl methanol (5.16 g, 9.76 mmol, 71.3% yield) as a colorless oil. ¹H NMR (500 MHz, Chloroform-d) δ 5.41-5.30 (m, 8H), 3.58 (s, 1H), 2.77 (t, J=6.7 Hz, 4H), 2.05 (q, J=6.9 Hz, 8H), 1.49-1.25 (m, 40H), 0.89 (t, J=6.8 Hz, 6H).

[1811] Fourth-step, 2-cyanoethyl ((6Z,9Z,28Z,31Z)-heptatriaconta-6,9,28,31-tetraen-19-yl) diisopropylphosphoramidite. To a solution of dilinoleyl methanol (2.5 g, 4.73 mmol) in anhdrous dichloromethane (30 mL) at room temperature was added DIPEA (4.12 ml, 23.63 mmol) and 3-(chloro(diisopropylamino)phosphino)propanenitrile (1.180 ml, 5.67 mmol). The reaction mixture was stirred at room temperature for 2 hours. The reaction mixture was added EtOAc (300 mL), washed with sat sodium bicarbonate, dried over a hydrous sodium sulfate, and concentrated under reduced pressure to give a residue, which was purified by ISCO (40 g gold silica gel cartridge) eluting with hexane to 5% EtOAc in hexane containing 5% TEA to give 2-cyanoethyl (6Z,9Z,28Z,31Z)-heptatriaconta-6,9,28,31-tetraen-19-yl diisopropylphosphoramidite (2.97 g, 4.07 mmol, 86% yield) as a colorless oil. ¹H NMR (500 MHz, Chloroform-d) δ 5.30-5.41 (m, 8H), 3.85-3.72 (m, 3H), 3.59 (dp, J=10.2, 6.8 Hz, 2H), 2.77 (t, J=6.8 Hz, 4H), 2.61 (t, J=6.6 Hz, 2H), 2.05 (q, J=7.1 Hz, 8H), 1.60-1.46 (m, 4H), 1.42-1.27 (m, 36H), 1.18 (dd, J=6.8, 3.0 Hz, 12H), 0.89 (t, J=6.8 Hz, 6H). ³¹P NMR (202 MHz, Chloroform-d) δ 147.68.

### Example 3. Lipid Conjugation of WV-942 Amino Linker

[1812] General route for conjugation of lipids with C₆-amino linked WV-942 (SEQ ID NO: 2423) is exemplified in the following Scheme (Scheme 1).

[chemical structure]

[1813] Structures of various lipid carboxylic acids and alcohols used for conjugation is depicted below:

[chemical structure]

[chemical structure]

[1814] General Procedure for conjugation of lipids with C6-amino linked WV-942. A mixture of the lipid acid (55 μmol), HATU (50 μmol), Diisopropylethylamine (100 μmol) and NMP (500 μl) was shaken well at room temperature for 10 minutes, in a 3 ml plastic vial. This activated acid was pipetted into a plastic vial containing the CPG (5 μmol, CPG is linked to amino linked oligo). The contents of the vial was thoroughly mixed and shaken well for 12 hours. After this time the supernatant NMP was removed carefully. The CPG was washed with acetonitrile (1 ml×3) and dried in a speed vac. A 1:1 mixture (1 ml) of ammonium hydroxide and methyl amine (AMA) was added and heated at 35° C. for 1 hour with intermittent shaking. After 1 hour, the CPG was transferred into a small filtration cartridge, filtered, washed with DMSO (500 μl×2) and washed with water (1 ml×3). Filtrate and washings were combined and diluted to 10 ml using water. This solution was cooled to zero degrees celsius and neutralized with glacial acetic acid until pH of the solution reached 7.5. Crude product was analyzed by UV spectrometer, reverse phase HPLC and LC-MS. Purification of the crude product was done by RP HPLC.

TABLE 5
(Amount of CPG, Lipid acid, HATU, DIPEA
and NMP used for the coupling reactions).

| | | | | HATU | DIPEA | |
|---|---|---|---|---|---|---|
| | CPG | | | (50 μmol | (MW = 129) | |
| EXP | (5 | Acid | | (MW = | d = 0.726 | |
| # | μmol) | [55 μmol] | | 379.24) | (100 μmol) | NMP |
| 1 | 70.5 | Lauric acid | | 19 mg | 18 μL | 500 μL |
| | | (MW = 200.32) | | | | |
| | | 11.01 | mg | | | |
| 2 | 70.5 | Myristic Acid | | 19 mg | 18 μL | 500 μL |
| | | (MW = 228.38) | | | | |
| | | 12.56 | mg | | | |
| 3 | 70.5 | Palmitic acid | | 19 mg | 18 μL | 500 μL |
| | | (MW = 256.26) | | | | |
| | | 14.1 | mg | | | |
| 4 | 70.5 | Stearic acid | | 19 mg | 18 μL | 500 μL |
| | | (MW = 284.27) | | | | |
| | | 15.63 | mg | | | |
| 5 | 70.5 | Oleic acid | | 19 mg | 18 μL | 500 μL |
| | | (MW = 282.47) | | | | |
| | | 15.53 | g | | | |
| 6 | 70.5 | Linolenic acid | | 19 mg | 18 μL | 500 μL |
| | | (MW = 280.45) | | | | |
| | | 15.4 | mg | | | |
| 7 | 70.5 | α-Linoleic acid | | 19 mg | 18 μL | 500 μL |
| | | (MW = 278.44) | | | | |
| | | 15.3 | mg | | | |
| 8 | 70.5 | γ-Linoleic acid | | 19 mg | 18 μL | 500 μL |
| | | (MW = 278.44) | | | | |
| | | 15.3 | mg | | | |
| 9 | 70.5 | cis-DHA | | 19 mg | 18 μL | 500 μL |
| | | (MW = 328.24) | | | | |
| | | 18.05 | mg | | | |
| 10 | 70.5 | Turbinaric acid | | 19 mg | 18 μL | 500 μL |
| | | (MW = 400.36) | | | | |
| | | 22 | mg | | | |

[1815] After HPLC purification each fraction was analyzed by RP HPLC and LC-MS. Pure fractions were combined and solvent was removed under vacuum (speed vaac). Residue was dissolved in water and desalted (Triethyl ammonium ion was replaced with sodium ion) on a C-18 cartridge. Solvent was removed on a speed vaac and the residue was filtered through a centrifugal filter (Amicon Ultra-15 by Millipore), lyophilized and analyzed.

| Oligo | Conjugated | Total | Amount | Amount |
|---|---|---|---|---|
| (Wave#) | Acid | ODs | (μmol) | (mg) |
| WV2578 | Lauric Acid | 287 | 1.40 | 9.79 |
| WV2579 | Myristic Acid | 331 | 1.62 | 11.29 |
| WV2580 | Palmitic Acid | 268 | 1.31 | 9.14 |
| WV2581 | Stearic Acid | 265 | 1.30 | 9.04 |
| WV2582 | Oleic Acid | 262 | 1.28 | 8.94 |
| WV2583 | Linoleic Acid | 120 | 0.59 | 4.09 |
| WV2584 | α-Linolenic Acid | 285 | 1.39 | 9.72 |
| WV2585 | γ-Linolenic Acid | 297 | 1.45 | 10.13 |
| WV2586 | cis-DHA | 274 | 1.34 | 9.35 |
| WV2587 | Turbinaric acid | 186 | 0.91 | 6.35 |
| WV2588 | Dilinoleyl* | 345 | 1.69 | 11.77 |

*Synthesized on a solid support.

### Example 4. In Vitro Efficacy of Oligonucleotides Conjugated to Lipids

[1816] Cell Treatments and RNA Extraction

[1817] Primary human myoblasts from a patient with (deletion exon 48-50), DL 589.2 (deletion exon 51-55) were seeded into 12-well-plate pre-coated with matrigel (BD Biosciences) with density of 60×10³ cells per well in muscle cell proliferation medium (PromoCell GmbH, Heidelberg, Germany) at 37° C. with 500 CO₂. The next day, proliferation medium was replaced with muscle differentiation medium with 5% horse serum containing 10 μM oligos indicated in FIG. 1 and Table 1.

[1818] The oligonucleotide, which is identical to Drisapersen, has the sequence: 5′-mU*mC*mA*mA*mG*mG*mA*mA*mG*mA*mU*mG*mG*mC*mA*mU*mU*mU*mC*mU-3′, wherein * indicates a stereorandom phosphorothioate; and m indicates a 2′-OMe. WV-942 was conjugated with a lipid, as indicated in Table 1, on the 5′ end of the oligonucleotide.

TABLE 5
Lipids conjugated to biologically
active agent, oligonucleotide WV-942.

| Oligonucleotide | Conjugated Acid |
|---|---|
| WV-942 | — |
| WV-2578 | Lauric acid |
| WV-2579 | Myristic Acid |
| WV-2580 | Palmitic acid |
| WV-2581 | Stearic acid |
| WV-2582 | Oleic acid |
| WV-2583 | Linoleic acid |
| WV-2584 | Alpha-Linolenic acid |
| WV-2585 | Gamma-Linolenic acid |
| WV-2586 | cis-DHA |
| WV-2587 | Turbinaric acid |
| WV-2588 | Dilinoleyl |

[1819] Cells were differentiated for 4 days. Differentiation medium was then removed from each well and replaced with 500 μl of Trizol. Total RNA was extracted with 300 μl of phenol/chloroform, precipitated with 250 μl isopropanol, washed with 800 μl of 75% ethanol, and finally dissolved in 50 μl RNase free water.

[1820] Procedure of Nested PCR and Taqman Assay for DMD Skipping

[1821] Total cellular RNA was first reverse-transcribed into cDNA using the High-Capacity RNA-to-cDNA™ Kit from ThermoFisher Scientific following the protocol provided by the vendor.

[1822] For nested PCR, resulting cDNA was amplified sequentially using two sets of primers for nested PCR. PCR products were examined and visualized on agarose gels.

[1823] For the Taqman assay, skipped and unskipped transcripts in the cDNA were preamplified for 14 cycles using TaqMan® PreAmp Master Mix from ThermoFisher Scientific following the protocol provided. The amplification procedures are 95° C. for 10 min, then 14 cycles of 95° C. for 15 sec and 60° C. for 4 min. Preamplified cDNA was then analyzed for 40 cycles on LightCycler system (95° C. for 10 min, followed by 40 cycles of 95° C. for 15 sec and 60° C. for 1 min). Reactions contained 5 μl preamplified cDNA, 0.5 μl of skipped or unskipped Taqman assay and 0.5 μl Taqman assay for endogenous control, 4 μl water and 10 μl of Taman universal PCR master mix in a total volume of 20 μl. Data was analyzed using the LightCycler program to calculate Ct values. Endogenous controls include GAPDH, as well as muscle differentiation markers such as MyoD, desmin, myogenin, utrophin, myosin heavy chain and DMD itself.

Custom TaqMan MGB probes and primers were synthesized by Life Technologies using the following sequences.

Unskipped (exon 51)
Forward:

(SEQ ID NO: 2424)

GTGATGGTGGGTGACCTTGAG
Reverse:

(SEQ ID NO: 2425)

TTTGGGCAGCGGTAATGAG
Probe:

(SEQ ID NO: 2426)

CAAGCAGAAGGCAACAA
Skipped (exon 51)
Forward:

(SEQ ID NO: 2427)

TGAAAATAAGCTCAAGCAGACAAATC
Reverse:

(SEQ ID NO: 2428)

GACGCCTCTGTTCCAAATCC
Probe:

(SEQ ID NO: 2429)

CAGTGGATAAAGGCAACA

Results are shown in FIG. 1.

### Example 5. In Vivo Delivery of Compositions Comprising a Biologically Active Agent and a Lipid

[1824] In Vivo Oligo Treatment

[1825] Five weeks old mdx mice were dosed subcutaneously at 5 ml/kg at concentration of 10 mg/ml on Day 1. On Day 4, all animals were subjected to both terminal blood and tissue collection. Plasma was aliquoted into polypropylene tubes and stored at −70° C. For tissue collections, all animals were euthanized via CO₂ asphyxiation, and perfused using PBS. The following tissues were collected: liver, kidney, spleen, heart, thoracic diaphragm, gastrocnemius, quadriceps and triceps. Tissues were snap-frozen (in liquid nitrogen) and stored at −70° C.

[1826] Procedure:

[1827] In vivo biodistribution of the Control unconjugated ASO WV-942 or WV-942 conjugated to seven different lipids (WV-2588, -2581, -2582, -2584, -2585, -2586, -2587) was tested following a single subcutaneous administration to C57BL/10ScSn-Dmd^{mdx}/J male mice 5 weeks of age (Jackson Laboratory, Stock #001801). The study design is described in Table 1.

[1828] Animals were housed at 18° C. to 26° C. and 30% to 70% humidity two per cage in polycarbonate cages during acclimation and throughout the study. Housing included Beta Chip® and Enviro-Dri contact bedding. Standard chow and water were supplied ad libitum.

[1829] The study complied with all applicable sections of the Final Rules of the Animal Welfare Act regulations (Code of Federal Regulations, Title 9), the Public Health Service Policy on Humane Care and Use of Laboratory Animals from the Office of Laboratory Animal Welfare, and the Guide for the Care and Use of Laboratory Animals from the National Research Council. The protocol and any amendments or procedures involving the care or use of animals in this study were reviewed and approved by the Testing Facility Institutional Animal Care and Use Committee before the initiation of such procedures.

TABLE 6
Study design.

| | | | | Number | | | |
|---|---|---|---|---|---|---|---|
| | | | Dosing | of | Test Article | Dose | |
| | Test | Dose, | Route/Dosing | animals | Concentration, | Volume, | Termination |
| Group | Article | mg/kg | Day | (males) | mg/ml | ml/kg | Day |
| 1 | PBS | — | SC, Day 1 | 3 | 0 | 5 | Day 3 |
| 2 | WV-942 | 50 | SC, Day 1 | 3 | 10 | 5 | Day 3 |
| 3 | WV-2588 | 50 | SC, Day 1 | 3 | 10 | 5 | Day 3 |
| 4 | WV-2581 | 50 | SC, Day 1 | 3 | 10 | 5 | Day 3 |
| 5 | WV-2582 | 50 | SC, Day 1 | 3 | 10 | 5 | Day 3 |
| 6 | WV-2584 | 50 | SC, Day 1 | 3 | 10 | 5 | Day 3 |
| 7 | WV-2585 | 50 | SC, Day 1 | 3 | 10 | 5 | Day 3 |
| 8 | WV-2586 | 50 | SC, Day 1 | 3 | 10 | 5 | Day 3 |
| 9 | WV-2587 | 50 | SC, Day 1 | 3 | 10 | 5 | Day 3 |

[1830] Animals were euthanized via CO₂ asphyxiation 48 hours (±1 hour) after subcutaneous injection on Day 1. All animals were perfused using PBS. The following collected tissues (liver, kidney 2x, spleen, heart, thoracic diaphragm, gastroenemius, quadriceps, and triceps) were rinsed briefly with PBS, gently blotted dry, snap frozen (liquid N2) in polypropylene tubes and storaged at −70° C. until processing for further analysis.

[1831] Oligo Quantification

[1832] Briefly, each mouse tissue was weighted and lysed in tissue lysis buffer.

[1833] Hybridization Assay to Detect ASO: Sandwich

[1834] Methods:

[1835] Probe:

[1836] Capture probe: /5AmMC12/A+GA+AA+TG+CC+A (SEQ ID NO: 2430)

[1837] Detection probe: T+CT+TC+CT+TG+A/3Bio/ (SEQ ID NO: 2431)

[1838] Plate:

[1839] Coat Pierce® Amine-binding, Maleic Anhydride 96-Well Plates, with diluted Capture probe at 500 nM in 2.5% NaHCO₃, at 37 C for at least 1 hour (or 4 C overnight). After wash with PBST (1×PBS+0.1% Tween-20), block in 5% fat-free milk/PBST at 37 C for >1 hour.

[1840] Tissue Sample Preparation

[1841] Weight tissue pieces, add 4 volume of lysis buffer to tissue to achieve 0.2 g tissue/ml, in tissue lysis buffer (IGEPAL 0.5%, 100 mM NaCl, 5 mM EDTA, 10 mM Tris pH8, protease K 300 ug/ml). The homogenate was generated by Bullet Blender (NextAdvance).

[1842] Standard Curve:

[1843] Dilute Test Article into non-treated blank tissue homogenates (matrix) at 10-50 ug/ml (50-250 ug/g tissue). The standard was further serial diluted 1:1 with matrix for 8 points to form standard curve series.

[1844] Hybrid-ELISA:

[1845] Dilute Standard Curve samples, treated tissue homogenates 100-500 times with hybridization buffer (4 M Guanidine; 0.33% N-Lauryl Sarcosine; 25 mM Sodium Citrate; 10 mM DTT). 20 ul of diluted tissue samples were mixed with 180 ul of detection probe diluted in PBST at 333 nM. Samples were denatured using following condition: 65 C, 10 min; 95 C, 15 min; 4 C, ∞. Add 50 ul/well denatured samples into coated 96 wells. Incubate at 4 C for overnight. Wash plate 3 times with PBST. Add 1:2000 dilution of streptavidin-AP in PBST. Incubate at room temperature for 1 hour. Wash plate 5 times×2 cycles with PBST on Molecular Device plate wash machine. Add 100 ul/well AttoPhos substrates. Incubate for 10 min, read plate at Molecular Device M5 in fluorescence channel: Ex435 nm, Em555 nm. Take another read at 20 min. The ASO concentration is calculated against Standard Curve by using either linear curve fit or 4-parameter curve fit.

[1846] An example protocol is illustrated in FIG. 8.

### Example 6. Example Assay for Measuring TLR9 Agonist and Antagonist Activities

[1847] Various assays can be utilized to assay TLR9 activities of provided compositions in accordance with the present disclosure. In one example human TLR9 report assay, HEK-Blue™ TLR9 cells which stably overexpress the human TLR9 gene and an NF-kB inducible secreted embryonic alkaline phosphatase (SEAP) were obtained from Invivogen (San Diego, CA, USA). Oligonucleotides at indicated concentrations were plated into 96-well-plates in the final volume of 20 mL in water. 4×10⁴ HEK-Blue TLR9 cells were added to each well in a volume of 180 mL in SEAP detection medium. In certain experiments, oligonucleotides were added in the presence or absence of various concentrations of TLR9 agonists (e.g., oligonucleotide ODN2006), and the cultures were continued for 16 h. At the end of the treatment, OD was measured at 655 nM. The results are expressed as fold change in NF-κB activation over phosphate buffered saline (PBS)-treated cells.

### Example 7. Example In Vivo Delivery of Provided Compounds and Compositions

[1848] Example in vivo oligonucleotide treatment: Five-week-old mdx mice were dosed i.v. or subcutaneously at 5 mL/kg at concentration of 10 mg/mL on Day 1. On Day 4 (or other days as desired), all animals were subjected to both terminal blood and tissue collection. Plasma was aliquoted into polypropylene tubes and stored at −70° C. For tissue collections, all animals were euthanized via CO₂ asphyxiation, and perfused using PBS. The following tissues were also collected: liver, kidney, spleen, heart, thoracic diaphragm, gastrocnemius, quadriceps and triceps. Tissues were snap-frozen (in liquid nitrogen) and stored at −70° C.

[1849] Example procedure: In vivo biodistribution of the control oligonucleotide WV-942 and oligonucleotides to be tested (e.g., WV-2588, WV-2581, WV-2582, WV-2584, WV-2585, WV-2586, WV-2587, etc.) was tested following a single subcutaneous administration to C57BL/10ScSn-Dmd^{mdx}/J male mice 5 weeks of age (Jackson Laboratory, Stock #001801). Animals were housed at 18° C. to 26° C. and 30% to 70% humidity two per cage in polycarbonate cages during acclimation and throughout the study. Housing included Beta Chip® and Enviro-Dri contact bedding. Standard chow and water were supplied ad libitum. The study complied with all applicable sections of the Final Rules of the Animal Welfare Act regulations (Code of Federal Regulations, Title 9), the Public Health Service Policy on Humane Care and Use of Laboratory Animals from the Office of Laboratory Animal Welfare, and the Guide for the Care and Use of Laboratory Animals from the National Research Council. The protocol and any amendments or procedures involving the care or use of animals in this study were reviewed and approved by the Testing Facility Institutional Animal Care and Use Committee before the initiation of such procedures.

[1850] Animals were euthanized via CO₂ asphyxiation 48 hours (+1 hour) after subcutaneous injection on Day 1. All animals were perfused using PBS. The following collected tissues (liver, kidney 2x, spleen, heart, thoracic diaphragm, gastrocnemius, quadriceps, and triceps) were rinsed briefly with PBS, gently blotted dry, snap frozen (liquid N2) in polypropylene tubes and stored at −70° C. until processing for further analysis.

[1851] Oligonucleotide quantification: Briefly, each mouse tissue was weighted and lysed in tissue lysis buffer.

[1852] Hybridization assay to detect ASO: Sandwich

[1853] Methods:

[1854] Probe: Capture probe: /5AmMC12/A+GA+AA+TG+CC+A (SEQ ID NO: 2430); Detection probe: T+CT+TC+CT+TG+A/3Bio/ (SEQ ID NO: 2431)

[1855] Plate: Coat Pierce® Amine-binding, Maleic Anhydride 96-Well Plates, with diluted Capture probe at 500 nM in 2.5% NaHCO₃, at 37° C. for at least 1 hour (or 4° C. overnight). After wash with PBST (1×PBS+0.1% Tween-20), block in 5% fat-free milk/PBST at 37° C. for >1 hour.

[1856] Tissue sample preparation: Weigh tissue pieces, add 4 volumes of lysis buffer to tissue to achieve 0.2 g tissue/mL, in tissue lysis buffer (IGEPAL 0.5%, 100 mM NaCl, 5 mM EDTA, 10 mM Tris pH8, protease K 300 μg/mL). The homogenate was generated by Bullet Blender (NextAdvance).

[1857] Standard Curve: Dilute Test Article into non-treated blank tissue homogenates (matrix) at 10-50 μg/mL (50-250 μg/g tissue). The standard was further serial diluted 1:1 with matrix for 8 points to form standard curve series.

[1858] Hybrid-ELISA: Dilute Standard Curve samples, treated tissue homogenates 100-500 times with hybridization buffer (4 M Guanidine; 0.33% N-Lauryl Sarcosine; 25 mM Sodium Citrate; 10 mM DTT). 20 μL of diluted tissue samples were mixed with 180 μL of detection probe diluted in PBST at 333 nM. Samples were denatured using following condition: 65° C., 10 min; 95° C., 15 min; 4° C., ∞. Add 50 μL/well denatured samples into coated 96 wells. Incubate at 4° C. for overnight. Wash plate 3 times with PBST. Add 1:2000 dilution of streptavidin-AP in PBST. Incubate at room temperature for 1 hour. Wash plate 5 times×2 cycles with PBST on Molecular Device plate wash machine. Add 100 μL/well AttoPhos substrates. Incubate for 10 min, read plate at Molecular Device M5 in fluorescence channel: Ex435 nm, Em555 nm. Take another read at 20 min. Oligonucleotide concentration is calculated against Standard Curve by using either linear curve fit or 4-parameter curve fit.

[1859] Example test results were presented in the Figures, e.g., 31A-31D, demonstrating that provided oligonucleotides comprising lipid moieties have improved properties (e.g., distribution, metabolism, etc.).

### Example 8. Example synthesis of 1,7,14-trioxo-12,12-bis((3-oxo-3-((3-(4-sulfamoylbenzamido)propyl)amino)propoxy)methyl)-1-(4-sulfamoylphenyl)-10-oxa-2,6,13-triazaoctadecan-18-oic acid

[chemical structure]

[chemical structure]

[chemical structure]

[1861] Step 1: A solution of di-tert-butyl 3,3′-((2-amino-2-((3-(tert-butoxy)-3-oxopropoxy)methyl)propane-1,3-diyl)bis(oxy))dipropanoate (4.0 g, 7.91 mmol) and dihydro-2H-pyran-2,6(3H)-dione (0.903 g, 7.91 mmol) in THF (40 mL) was stirred at 50° C. for 3 hrs and at rt for 3 hrs. LC-MS showed desired product. Solvent was evaporated to give 5-((9-((3-(tert-butoxy)-3-oxopropoxy)methyl)-2,2,16,16-tetramethyl-4,14-dioxo-3,7,11,15-tetraoxaheptadecan-9-yl)amino)-5-oxopentanoic acid, which was directly used for next step without purification.

[1862] Step 2: To a solution of 5-((9-((3-(tert-butoxy)-3-oxopropoxy)methyl)-2,2,16,16-tetramethyl-4,14-dioxo-3,7,11,15-tetraoxaheptadecan-9-yl)amino)-5-oxopentanoic acid (4.90 g, 7.91 mmol) and (bromomethyl)benzene (1.623 g, 9.49 mmol) in DMF was added anhydrous K₂CO₃ (3.27 g, 23.73 mmol). The mixture was stirred at 40° C. for 4 hrs and at room temperature for overnight. Solvent was evaporated under reduced pressure. The reaction mixture was diluted with EtOAc, washed with water, dried over anhydrous sodium sulfate, and concentrated under reduced pressure to give a residue, which was purified by ISCO eluting with 10% EtOAc in hexane to 50% EtOAc in hexane to give di-tert-butyl 3,3′-((2-(5-(benzyloxy)-5-oxopentanamido)-2-((3-(tert-butoxy)-3-oxopropoxy)methyl)propane-1,3-diyl)bis(oxy))dipropanoate (5.43 g, 7.65 mmol, 97% yield) as a colorless oil. ¹H NMR (400 MHz, Chloroform-d) δ 7.41-7.28 (m, 5H), 6.10 (s, 1H), 5.12 (s, 2H), 3.72-3.60 (m, 12H), 2.50-2.38 (m, 8H), 2.22 (t, J=7.3 Hz, 2H), 1.95 (p, J=7.4 Hz, 2H), 1.45 (s, 27H); MS (ESI), 710.5 (M+H)+.

[1863] Step 3: A solution of di-tert-butyl 3,3′-((2-(5-(benzyloxy)-5-oxopentanamido)-2-((3-(tert-butoxy)-3-oxopropoxy)methyl)propane-1,3-diyl)bis(oxy))dipropanoate (5.43 g, 7.65 mmol) in formic acid (50 mL) was stirred at room temperature for 48 hrs. LC-MS showed the reaction was not complete. Solvent was evaporated under reduced pressure. The crude product was re-dissolved in formic acid (50 mL) and was stirred at room temperature for 6 hrs. LC-MS showed the reaction was complete. Solvent was evaporated under reduced pressure, co-evaporated with toluene (3×) under reduced pressure, and dried under vacuum to give 3,3′-((2-(5-(benzyloxy)-5-oxopentanamido)-2-((2-carboxyethoxy)methyl)propane-1,3-diyl)bis(oxy))dipropanoic acid (4.22 g, 7.79 mmol, 100% yield) as a white solid. ¹H NMR (500 MHz, DMSO-d₆) δ 12.11 (s, 3H), 7.41-7.27 (m, 5H), 6.97 (s, 1H), 5.07 (s, 2H), 3.55 (d, J=6.4 Hz, 6H), 2.40 (t, J=6.3 Hz, 6H), 2.37-2.26 (m, 2H), 2.08 (t, J=7.3 Hz, 2H), 1.70 (p, J=7.4 Hz, 2H); MS (ESI), 542.3 (M+H)⁺.

[1864] Step 4: To a solution of 3,3′-((2-(5-(benzyloxy)-5-oxopentanamido)-2-((2-carboxyethoxy)methyl)propane-1,3-diyl)bis(oxy))dipropanoic acid (4.10 g, 7.57 mmol) and HOBt (4.60 g, 34.1 mmol) in DCM (60 mL) and DMF (15 mL) at 0° C. was added tert-butyl (3-aminopropyl)carbamate (5.94 g, 34.1 mmol), EDAC HCl salt (6.53 g, 34.1 mmol) and DIPEA (10.55 mL, 60.6 mmol). The reaction mixture was stirred at 0° C. for 15 minutes and at room temperature for 20 hrs. LC-MS showed the reaction was not complete. EDAC HCl salt (2.0 g) and tert-butyl (3-aminopropyl)carbamate (1.0 g) was added into the reaction mixture. The reaction mixture was stirred at room temperature for 4 hrs. Solvent was evaporated to give a residue, which was dissolved in EtOAc (300 mL), washed with water (1×), saturated sodium bicarbonate (2×), 10% citric acid (2×) and water, dried over sodium sulfate, and concentrated to give a residue which was purified by ISCO (80 g gold cartridge) eluting with DCM to 30% MeOH in DCM to give benzyl 15,15-bis(13,13-dimethyl-5,11-dioxo-2,12-dioxa-6,10-diazatetradecyl)-2,2-dimethyl-4,10,17-trioxo-3,13-dioxa-5,9,16-triazahenicosan-21-oate 5 (6.99 g, 6.92 mmol, 91% yield) as a white solid. ¹H NMR (500 MHz, Chloroform-d) δ 7.35 (t, J=4.7 Hz, 5H), 6.89 (s, 3H), 6.44 (s, 1H), 5.22 (d, J=6.6 Hz, 3H), 5.12 (s, 2H), 3.71-3.62 (m, 12H), 3.29 (q, J=6.2 Hz, 6H), 3.14 (q, J=6.5 Hz, 6H), 2.43 (dt, J=27.0, 6.7 Hz, 8H), 2.24 (t, J=7.2 Hz, 2H), 1.96 (p, J=7.5 Hz, 2H), 1.69-1.59 (m, 6H), 1.43 (d, J=5.8 Hz, 27H); MS (ESI): 1011.5 (M+H)+.

[1865] Step 5: To a solution of benzyl 15,15-bis(13,13-dimethyl-5,11-dioxo-2,12-dioxa-6,10-diazatetradecyl)-2,2-dimethyl-4,10,17-trioxo-3,13-dioxa-5,9,16-triazahenicosan-21-oate (1.84 g, 1.821 mmol) in DCM (40 mL) was added 2,2,2-trifluoroacetic acid (7.02 mL, 91 mmol). The reaction mixture was stirred at room temperature for overnight. Solvent was evaporated to give benzyl 5-((1,19-diamino-10-((3-((3-aminopropyl)amino)-3-oxopropoxy)methyl)-5,15-dioxo-8,12-dioxa-4,16-diazanonadecan-10-yl)amino)-5-oxopentanoate as a colorless oil. MS (ESI), 710.6 (M+H)⁺.

[1866] Step 6: To a solution of 4-sulfamoylbenzoic acid (1.466 g, 7.28 mmol) in DCM (40 mL) was added HATU (2.77 g, 7.28 mmol) followed by benzyl 5-((1,19-diamino-10-((3-((3-aminopropyl)amino)-3-oxopropoxy)methyl)-5,15-dioxo-8,12-dioxa-4,16-diazanonadecan-10-yl)amino)-5-oxopentanoate (1.293 g, 1.821 mmol) in DMF (4.0 mL). The mixture was stirred at room temperature for 5 hrs. Solvent was evaporated under reduced pressure to give a residue, which was purified by ISCO (40 g gold column) eluting with DCM to 50% MeOH in DCM to give benzyl 1,7,14-trioxo-12,12-bis((3-oxo-3-((3-(4-sulfamoylbenzamido)propyl)amino)-propoxy)methyl)-1-(4-sulfamoylphenyl)-10-oxa-2,6,13-triazaoctadecan-18-oate (0.36 g, 0.286 mmol, 16% yield). ¹H NMR (400 MHz, DMSO-d₆) δ 8.60 (t, J=5.6 Hz, 3H), 7.96-7.81 (m, 15H), 7.44 (s, 6H), 7.35-7.23 (m, 5H), 7.04 (s, 1H), 5.02 (s, 2H), 3.50 (t, J=6.9 Hz, 6H), 3.48 (s, 6H), 3.23 (q, J=6.6 Hz, 6H), 3.06 (q, J=6.6 Hz, 6H), 2.29 (t, J=7.4 Hz, 2H), 2.24 (t, J=6.5 Hz, 6H), 2.06 (t, J=7.4 Hz, 2H), 1.69-1.57 (m, 8H).

[1867] Step 7: To a round bottom flask flushed with Ar was added 10% Pd/C (80 mg, 0.286 mmol) and EtOAc (15 mL). A solution of benzyl 1,7,14-trioxo-12,12-bis((3-oxo-3-((3-(4-sulfamoylbenzamido)propyl)amino)propoxy)methyl)-1-(4-sulfamoylphenyl)-10-oxa-2,6,13-triazaoctadecan-18-oate (360 mg) in methanol (15 mL) was added followed by diethyl(methyl)silane (0.585 g, 5.72 mmol) dropwise. The mixture was stirred at room temperature for 3 hrs. LC-MS showed the reaction was complete. The reaction was diluted with EtOAc, and filtered through celite, washed with 20% MeOH in EtOAc, and concentrated under reduced pressure to give 1,7,14-trioxo-12,12-bis((3-oxo-3-((3-(4-sulfamoylbenzamido)propyl)-amino)propoxy)methyl)-1-(4-sulfamoylphenyl)-10-oxa-2,6,13-triazaoctadecan-18-oic acid (360 mg, 100% yield) as a white solid. ¹H NMR (400 MHz, DMSO-d₆) δ 8.60 (t, J=5.6 Hz, 3H), 7.94-7.81 (m, 15H), 7.44 (s, 6H), 7.04 (s, 1H), 3.50 (t, J=6.9 Hz, 6H), 3.48 (s, 6H), 3.23 (q, J=6.6 Hz, 6H), 3.06 (q, J=6.6 Hz, 6H), 2.24 (t, J=6.4 Hz, 6H), 2.14 (t, J=7.5 Hz, 2H), 2.05 (t, J=7.4 Hz, 2H), 1.66-1.57 (m, 8H); MS (ESI), 1170.4 (M+H)⁺.

### Example 9. Example Synthesis of Amidites for Mod030-Mod033

[1868] To a solution of lauryl alcohol (5.2 g, 28 mmol) in 60 mL dry DCM, under an atmosphere of argon, at room temperature was added DIPEA (18 g, 140 mmol) and stirred for 5 minutes. To this solution was added 2-cyanoethyl N,N-diisopropylchlorophosphoramidite (7.9 g, 33.5 mmol) dropwise and stirred for 4 hours. Solvent from the reaction mixture was evaporated under reduced pressure, diluted with 300 mL ethyl acetate, washed with sat. NaHCO₃ and dried over anhydrous sodium sulfate. Removal of solvent and column chromatography over silica gel (80 g regular silica, 0-30% ethyl acetate in hexane containing 5% triethyl amine) using ISCO afforded the product. Weight of product obtained: 3.8 g (35%). ¹H NMR (500 MHz; CDCl₃): δ 3.88-3.76 (m, 2H), 3.68-3.55 (m, 4H), 2.62 (t, 2H), 1.62-1.35 (m, 2H), 1.32-1.28 (m, 18H), 1.19-1.17 (m, 12H), 0.87 (t, 3H). ³¹P NMR (202.4 MHz; CDCl₃): δ 147.2 (s). Amidites for Mod031, Mod032 and Mod033 were prepared using the same procedure. These amidites were used as the last amidite in the synthesis cycle to prepare oligonucleotides comprising Mod030-Mod033.

### Example 10. Example Preparation of Acid for Mod024

[chemical structure]

[1870] GlucNAc acid 1 (WO 2014/025805 A1) (1.88 g, 4.2 mmol) and HOBT (0.73 g, 5.4 mmol) was stirred in anhydrous DMF-DCM mixture (11+15 mL) under nitrogen at room temperature for 10 minutes. HBTU (2.05 g, 5.4 mmol) was added followed by DIPEA (2.17 g, 16.8 mmol) at 10° C. To this solution was added tri-amine salt 2 (WO 2014/025805 A1) (1.38 g, 1.2 mmol) and stirred overnight. Solvent was removed under vacuum and the residue was dissolved in ethyl acetate (200 mL). To this solution was added 100 ml of a mixture of sat. ammonium chloride, sat. sodium chloride, sat. sodium bicarbonate and water (1:1:1:1). The ethyl acetate layer was turbid initially. After thoroughly shaking the layers got separated. Aqueous layer was extracted with ethyl acetate (×2). Combined organic fractions were washed with brine and dried over anhydrous sodium sulfate. Solvent removal under reduced pressure afforded 490 mg of crude product. This product was purified by CC on an ISCO machine. The eluent was DCM-Methanol (0-20% methanol in DCM). Amount of product obtained was 1.26 g (50%). LC-MS (+ mode): 1768 (M-1GlucNAc), 1438 (M-2 GlucNAc), 1108 (M-3 GlucNAc), 1049 (M/2+1).

[chemical structure]

[1871] To a solution of benzyl ester 4 (0.25 g, 0.119 mmol) in 7 mL dry methanol, under an atmosphere of argon, 10% Pd/C (50 mg) was added followed by 1.5 mL (9.4 mmol) triethylsilane (TES) drop wise. A vigorous reaction set in and the RMV was stirred for 3 hours. LC-MS analysis of the product indicates completion of reaction. The RMV was filtered over celite and solvent was removed under vacuum. The crude product was triturated (×3) with ether-methanol (3:1) mixture and dried under vacuum. This product 5 was used for conjugation with oligonucleotide chains without further purification, and after conjugation the hydroxyl groups were deprotected, for example, during cleavage and/or deprotection of oligonucleotides to incorporate Mod024. If desired, a number of protocols can be utilized to deprotect the hydroxyl groups in 5 to provide the acid with deprotected hydroxyl groups. ¹H NMR (500 MHz, DMSO-D6): δ 7.90 (3H, d, J=N0 Hz), 7.80 (t, 3H), 7.70 (t, 3H), 5.03 (t, 3H), 4.77 (t, 3H), 4.54 (3H, d, J=10 Hz), 4.14 (3H, dd, J₁=9 Hz, J₂=5 Hz), 3.97-3.93 (m, 3H), 3.79-3.74 (m, 3H), 3.69-3.61 (m, 6H), 3.51-3.47 (m, 3H), 3.40-3.35 (m, 3H), 3.31 (d, 3H, J=9 Hz), 2.98 (m, 12H), 2.23 (t, 3H), 2.13 (t, 3H), 2.01-1.99 (m, 3H), 1.97 (s, 9H), 1.92 (s, 9H), 1.86 (s, 9H), 1.71 (s, 9H), 1.49-1.32 (m, 22H), 1.18 (br s, 12H). Mod026 were incorporated using similar strategies.

### Example 11. Example Procedure for Conjugation—Preparing Oligonucleotide Chains with Amino Groups

[1872] As appreciated by a person having ordinary skill in the art, various technologies, e.g., linkers, methods, functional groups, etc. can be utilized to prepare provided oligonucleotides in accordance with the present disclosure, including those comprising lipid moieties and/or targeting components. Below are example procedures for preparing oligonucleotides with amino groups for incorporating various moieties, e.g., lipid moieties, targeting components, etc. A person of ordinary skill in the art appreciates that various technologies can be used to conjugate lipids with other types of biologically active agents, e.g., small molecules, peptides, proteins, etc., including methods, reagents, etc. widely known and used in the art, in accordance with the present disclosures.

[1873] “On Support” Conjugation Strategy

[1874] Preparation of 5′-amino-modified oligonucleotides for “on support” conjugation was carried out using MMT-amino C6 CE phosphoramidite (ChemGenes Corporation catalog No. CLP-1563 or Glen Research catalog No. 10-1906), which was added as the last phosphoramidite and coupled to 5′-OH of the oligonucleotide chain on solid support using oligonucleotide synthesis chemistry. After coupling, the newly formed linkage was optionally oxidized to provide a phosphodiester linkage if desired using, for example, tert-butyl hydroperoxide (e.g., 1.1 M in 20:80 decane/dichloromethane), 12 (e.g., in pyridine/water, THF/pyridine/water, etc.), etc., depending on the oligonucleotide synthesis chemistry. When a phosphorothioate linkage was desired, PolyOrg Sulfa (e.g., 0.1 M in acetonitrile) or DDTT (e.g., 0.1 M in pyridine) was used for sulfurization. The MMT protecting group was then removed while the oligonucleotide was on support with deblocking reagent (e.g., 3% trichloroacetic acid in dichloromethane, 3% dichloroacetic acid in toluene, etc.) until the yellow color was no longer observed. Various compounds, e.g., fatty acids, sugar acids, etc. were then coupled, and optionally followed by cleavage from the support, deprotection and/or purification.

[1875] “In Solution” Conjugation Strategy

[1876] Preparation of 5′-amino-modified oligonucleotides for “in solution” conjugation strategy was carried out using TFA-amino C6 CED phosphoramidite (ChemGenes Corporation catalog No. CLP-1553 or Glen Research catalog No. 10-1916), which was added as the last phosphoramidite and coupled to 5′-OH of the oligonucleotide chain on solid support using oligonucleotide synthesis chemistry. After coupling, the newly formed linkage was optionally oxidized to provide a phosphodiester linkage if desired using, for example, tert-butyl hydroperoxide (e.g., 1.1 M in 20:80 decane/dichloromethane), 12 (e.g., in pyridine/water, THF/pyridine/water, etc.), etc., depending on the oligonucleotide synthesis chemistry. When a phosphorothioate linkage was desired, PolyOrg Sulfa (e.g., 0.1 M in acetonitrile) or DDTT (e.g., 0.1 M in pyridine) was used for sulfurization. The amine-modified oligonucleotides were then cleaved from the support, deprotected and purified to provide products with free amino groups for conjugation. Usually the TFA group was removed during cleavage and deprotection of the oligonucleotides. The oligonucleotides were then utilized for conjugation

### Example 12. Example Procedure for Conjugation on Solid Support

[1877] In some embodiments, lipid conjugation to biologically active agents can be performed using solid support. As appreciated by a person having ordinary skill in the art, a number of widely known and practiced technologies, e.g., reagents, methods, etc., can be utilized to prepare provided oligonucleotide compositions, including those comprising lipid moieties, in accordance with the present disclosure. Two example schemes are provided in the present and following examples for illustration of conjugation of lipids, targeting components, etc. to oligonucleotides. In some embodiments, R^{LD}—COOH is a fatty acid as described herein (prepared and/or commercially available) to provide R^{LD} as illustrated in provided oligonucleotides, e.g., certain example oligonucleotides in Table 4. In some embodiments, R^{LD}—COOH is an acid comprising targeting component (prepared and/or commercially available) as described herein to provide R^{LD} as illustrated in provided oligonucleotides, e.g., certain example oligonucleotides in Table 4.

[1878] Example Procedure for Conjugation on Solid Support:

[chemical structure]

[1879] In an example procedure, a mixture of a lipid acid (1 μmol, 1 eq.), HATU (0.9 eq), diisopropylethylamine (10 eq) and NMP (500 μl) was shaken well at room temperature for 10 minutes, in a 3 mL plastic vial. This activated acid was pipetted into a plastic vial containing oligonucleotides (e.g., see example above) on solid support (0.09 μmol, 0.9 eq). The contents of the vial was thoroughly mixed and shaken well for 12 hours. After this time the supernatant NMP was removed carefully. The solid support was washed with acetonitrile (1 mL×3) and dried in a speed vac. A 1:1 mixture (1 mL) of ammonium hydroxide and methyl amine (AMA) was added and heated at 35° C. for 1 hour with intermittent shaking. After 1 hour, the CPG was transferred into a small filtration cartridge, filtered, washed with DMSO (500 μl×2) and washed with water (1 mL×3). Filtrate and washings were combined and diluted to 10 mL using water. This solution was cooled to 0° C. and neutralized with glacial acetic acid until pH of the solution reached 7.5. (Alternatively the dried solid support can be treated with 35% NH₄OH at 60° C. for 12 hours, cooled, filtered and neutralized with glacial acetic acid. For oligos containing fluoro group at 2′ position, a mixture of 35% ammonium hydroxide and ethanol (3:1) was used with temperature not exceeding 40° C.). Crude product was analyzed by UV spectrometer, reverse phase HPLC and LC-MS. Purification of the crude product was done by RP-HPLC. After HPLC purification each fraction was analyzed by RP-HPLC and LC-MS. Pure fractions were combined and solvent was removed under vacuum (speed vac). Residue was dissolved in water and desalted (Triethyl ammonium ion was replaced with sodium ion) on a C-18 cartridge. Solvent was removed on a speed vaac and the residue was filtered through a centrifugal filter (Amicon Ultra-15 by Millipore), lyophilized and analyzed.

[1880] For example, for synthesis of WV-2578, a mixture of lauric acid (11.01 mg, 0.0549 mmol), HATU (19 mg, 0.050 mmol) and diisopropylethyl amine (18 μL, 0.1 mmol) was dissolved in 500 μL of dry NMP and shaken well for five minutes. This activated acid was pipetted into a plastic vial containing oligonucleotides on solid support (70.5 mg, 0.005 mmol). The contents of the vial was thoroughly mixed and shaken well for 12 hours. After this time supernatant NMP was removed carefully. The solid support was washed with acetonitrile (1 mL×3) and dried in a speed vac. A 1:1 mixture (1 mL) of ammonium hydroxide and methyl amine (AMA) was added and heated at 35° C. for 1 hour with intermittent shaking. After 1 hour, the CPG was transferred into a small filtration cartridge, filtered, washed with DMSO (500 μL×2) and washed with water (1 mL×3). Filtrate and washings were combined and diluted to 10 mL using water. This solution was cooled to 0° C. and neutralized with glacial acetic acid until pH of the solution reached 7.5. Purification of the crude product was done by RP-HPLC. After HPLC purification each fraction was analyzed by RP-HPLC and LC-MS. Pure fractions were combined and solvent was removed under vacuum (speed vac). Residue was dissolved in water and desalted (triethyl ammonium ion was replaced with sodium ion) on a C-18 cartridge. Solvent was removed on a speed vac and the residue was filtered through a centrifugal filter (Amicon Ultra-15 by Millipore), lyophilized and analyzed. Average mass of WV2578 calculated: 7355, found (deconvoluted mass):7358. Additional examples include:

| | CPG | |
|---|---|---|
| EXP* | (5 μmol) | Acid (55 μmol) |
| 1 | 70.5 | Lauric acid (MW = 200.32) 11.01 mg |
| 2 | 70.5 | Myristic Acid (MW = 228.38) 12.56 mg |
| 3 | 70.5 | Palmitic acid (MW = 256.26) 14.1 mg |
| 4 | 70.5 | Stearic acid (MW = 284.27) 15.63 mg |
| 5 | 70.5 | Oleic acid (MW = 282.47) 15.53 g |
| 6 | 70.5 | Linolenic acid (MW = 280.45) 15.4 mg |
| 7 | 70.5 | α-Linolenic acid (MW = 278.44) 15.3 mg |
| 8 | 70.5 | γ-Linolenic acid (MW = 278.44) 15.3 mg |
| 9 | 70.5 | cis-DHA (MW = 328.24) 18.05 mg |
| 10 | 70.5 | Turbinaric acid (MW = 400.36) 22 mg |

*HATU (50 μmol, MW = 379.24, 19 mg),
DIPEA (MW = 129, d = 0.726, 100 μmol, 18 μL),
NMP (500 μL).
Example products include (Total ODs and Amount of lipid conjugates after purification; some may be described in previous examples):

| | Conjugated | Total | Amount | Amount |
|---|---|---|---|---|
| Oligonucleotide | Acid | ODs | (μmol) | (mg) |
| WV2578 | Lauric Acid | 287 | 1.40 | 9.79 |
| WV2579 | Myristic Acid | 331 | 1.62 | 11.29 |
| WV2580 | Palmitic Acid | 268 | 1.31 | 9.14 |
| WV2581 | Stearic Acid | 265 | 1.30 | 9.04 |
| WV2582 | Oleic Acid | 262 | 1.28 | 8.94 |
| WV2583 | Linoleic Acid | 120 | 0.59 | 4.09 |
| WV2584 | α-Linolenic Acid | 285 | 1.39 | 9.72 |
| WV2585 | γ-Linolenic Acid | 297 | 1.45 | 10.13 |
| WV2586 | cis-DHA | 274 | 1.34 | 9.35 |
| WV2587 | Turbinaric acid | 186 | 0.91 | 6.35 |
| WV2588 | Dilinoleyl* | 345 | 1.69 | 11.77 |

*Synthesized on a solid support; last cycle using 2-cyanoethyl ((6Z,9Z,28Z,31Z)-heptatriaconta-6,9,28,31-tetraen-19-yl) diisopropylphosphoramidite.

### Example 13. Example Procedure for Conjugation in Solution

[1881] In some embodiments, lipid conjugation with biologically active agents can be performed in solution. In some embodiments, provided oligonucleotides comprising lipid moieties were prepared in solution phase.

[1882] Example Procedure for Conjugation in Liquid Phase:

[chemical structure]

[1883] In an example procedure, a mixture of the lipid acid (1 eq.), HATU (1 eq.) and DIPEA (10 eq.) was mixed well in dry AcCN (10 mL) and kept for 10 minutes. This activated acid was added to the oligonucleotide (5 μmol) in water (5 mL) and mixed well on a vortex. This reaction was shaken for 1 hour. After 1 hour completion of the reaction was checked by LC-MS (usually the reaction is complete in 1 hour; if not, more acid-HATU complex can be added to drive the reaction to completion). Acetonitrile and water was removed under vacuum on a speed vac. The solid obtained was treated with 35% ammonium hydroxide (15 mL) and shaken at 60° C. for 12 hours; for 2′ fluoro oligonucleotides a 3:1 mixture of 35% ammonium hydroxide and ethanol was used for deprotection). After 12 hours solvent was removed under vacuum and diluted with water (15 mL), analyzed by LC-MS and RP-HPLC. Crude product was then purified by RP-HPLC and desalted.

[1884] For example, for synthesis of WV-3546, turbinaric acid (7 mg, 0.0174 mmol), HATU (6.27 mg, 0.0165 mmol) and DIPEA (22.2 mg, 0.172 mmol) was mixed well in dry AcCN (10 mL) and kept for 5 minutes in a 40 mL plastic vial. This activated acid was added to oligonucleotides in 3.77 mL water (80 mg, 0.0117 mmol) and mixed well on a vortex. This reaction was shaken for 2 hours. After 2 hours completion of the reaction was checked by LC-MS (reaction was complete). Acetonitrile and water was removed under vacuum on a speed vac. The solid obtained was treated with ammonia: ethanol mixture (3:1, 15 mL) and shaken at 40° C. for 12 hours. After 12 hours solvent was removed under vacuum and diluted with water (˜15 mL) and analyzed by LC-MS. Crude product was purified by RP-HPLC (50 mM triethyl ammonium acetate in water-acetonitrile system (0-70% acetonitrile in 45 minutes), X Bridge preparative C8 (19×250 mm column)). Average mass of WV3546 calculated: 7295. Mass found (deconvoluted mass): 7295.

### Example 14. Example Synthesis of MMT-C6-Amino DPSE-L Amidite

[chemical structure]

[1886] Preparation of chlorooxazaphospholidine: L-DPSE (37.1 g, 119 mmol) was dried by azeotropic evaporation with anhydrous toluene (150 mL) at 35° C. in a rotaevaporator and left in high vacuum for overnight. Then a solution of this dried L-DPSE (37.1 g) and 4-methylmorpholine (26.4 mL, 24.31 g, 240 mmol) dissolved in anhydrous toluene (150 mL) was added to an ice-cold solution of trichlorophosphine (16.51 g, 10.49 mL, 120 mmol) in anhydrous toluene (110 mL) placed in three neck round bottomed flask through cannula under Argon (start Temp: 0.6° C., Max: temp 14° C., 25 min addition) and the reaction mixture was stirred at 0° C. for 40 min. After that the precipitated white solid was filtered by vacuum under argon using spacial filter tube (Chemglass: Filter Tube, 24/40 Inner Joints, 80 mm OD Medium Frit, Airfree, Schlenk). The solvent was removed by rotaevaporator under argon at low temperature (25° C.) followed by dried under vacuum overnight (˜15 h) and the oily chlorooxazaphospholidine obtained was used for the next step.

[1887] MMT-C6-amino DPSE-L amidite: 6-(monomethoxytritylamino)hexan-1-ol (7.0 g, 17.97 mmol) was first dried by azeotropic evaporation by anhydrous toluene (50 ml) and dried under vacuum for overnight. Then the dried 6-(monomethoxytritylamino)hexan-1-ol was dissolved in anhydrous THE (80 mL) and added triethylamine (9.0 g, 90 mmol) and then the reaction solution was cooled to −70° C. To this cooled solution was added chlorooxazaphospholidine (6.76 g, 17.97 mmol) dissolved in anhydrous THF (50 mL) over 10 min. After the reaction mixture slowly warmed to room temperature (˜1 h), TLC indicated complete conversion of starting material. Then the reaction mixture was filtered carefully under vacuum/argon using the fitted filtration tube to remove precipitated solid, and washed with THE (80 mL). The solution was evaporated at 25° C. and the resulting oily residue was dissolved in Hexane-CH₂Cl₂ mixture with 5% TEA and purified using ISCO Combi-Flash system 220 g silica column (which was pre-de-activated with 3 CV MeOH, then equilibrated with ethyl acetate (5% TEA) 3 CV), with Hexane-EtOAc mixture (5% TEA). Pure fractions were collected and concentrated, dried overnight to afford MMT-C6-amino DPSE-L amidite as a colorless oily liquid. Yield: 8.0 g (62%). MS: calculated: 728.38; found by LCMS analysis at +Ve ion mode m/z: 729.54 (M⁺ ion), 747.50 (M⁺+18, H2O). ¹H-NMR (500 MHz, CDCl₃): δ 7.58-7.43 (m, 8H), 7.41-7.31 (m, 6H), 7.31-7.23 (m, 6H), 7.17 (t, J=7.2 Hz, 2H), 6.81 (d, J=8.7 Hz, 2H), 4.82 (dt, J=8.7, 5.7 Hz, 1H), 3.78 (s, 3H), 3.77-3.73 (m, 1H), 3.54 (qt, J=11.0, 5.2 Hz, 2H), 2.54 (q, J=7.2 Hz, 3H), 2.11 (t, J=7.0 Hz, 2H), 1.64-1.57 (m, 4H), 1.51-1.35 (m, 6H), 1.26 (q, J=9.9, 8.0 Hz, 2H), 1.04 (t, J=7.1 Hz, 2H), 0.67 (s, 3H). ¹³C NMR (500 MHz, CDCl₃) δ 157.87, 146.73, 146.67, 138.63, 136.89, 136.43, 134.71, 134.57, 134.48, 129.88, 129.46, 129.42, 128.66, 128.05, 127.96, 127.87, 127.81, 126.17, 113.13, 78.14, 78.07, 77.48, 77.43, 77.22, 76.97, 70.45, 68.03, 68.01, 63.50, 63.40, 55.22, 47.46, 47.17, 46.40, 43.69, 34.79, 31.34, 31.07, 27.19, 27.09, 26.04, 25.98, 17.60, 11.78, −3.17. ³¹P-NMR (500 MHz, CDCl₃): δ 154.27 (92.18%), 157.68 (3.56%), 146.35 (4.26%).

### Example 15. Example Preparation of WV-4107

[1888] Oligonucleotides were prepared using conditions for WV-3473 with all protecting groups and auxiliaries on and remained on solid support (if cleaved and deprotected, would provide WV-3473) using provided oligonucleotide technologies. In an example procedure, DPSE chemistry and GE Primer Support 5G (2.1 g), and the following cycles were used:

| | | | volume | waiting |
|---|---|---|---|---|
| step | operation | reagents and solvent | per cycle | time |
| 1 | detritylation | 3% DCA in toluene | ~150 mL | ~6 min |
| 2 | coupling | 0.175M monomer in MeCN or | 21 mL | 8 min |
| | | 20% isobutyronitrile in MeCN + 0.6M | | |
| | | CMIMT in MeCN | | |
| 3 | capping | 20% Ac₂O, 30% 2,6-lutidine in | 23 mL | 1.5 min |
| | | MeCN + 20% MeIm in MeCN | | |
| 4 | oxidation or | 1.1M TBHP in DCM-decane | 44 mL or | 2 min or 6 min |
| | sulfurization | or 0.1M POS in MeCN | 39 mL | |

[1889] After the last cycle, a portion of the oligonucleotides can be cleaved and deprotected for QC or other purposes. In an example procedure the oligonucleotides on support were washed with 6 column volumes of 20% diethylamine in acetonitrile for 15 min followed by an acetonitrile wash. The support was dried and then incubated in 1 M triethylamine hydrofluoride in 3:1 dimethylformamide/water for 1-1.5 h at 50° C. The sample was filtered and washed with acetonitrile and dried. The support was then incubated overnight at 40° C. in 3:1 ammonium hydroxide/ethanol.

[1890] For preparation of WV-4107, after the last cycle the DMT protecting group was removed using 3% dichloroacetic acid in toluene. During the coupling step, MMT-C6-amino DPSE-L amidite (0.175 M in isobutyronitrile) and CMIMT activator (0.6 M in acetonitrile) were added with a contact time of 8 min. The percent volume of activator was 55%. Capping was performed with 20% 1-methylimidazole in acetonitrile and 20/30/50 acetic anhydride/2,6-lutidine/acetonitrile. Sulfurization was performed using 0.1 M PolyOrg Sulfa in acetonitrile.

[1891] The MMT protecting group was then removed while the oligonucleotide was on support with deblocking reagent (3% dichloroacetic acid in toluene) until the yellow color was no longer observed, providing WV-4191. Stearic acid was then coupled to the amine using described procedure above. The oligonucleotides on support were washed with 20% diethylamine in acetonitrile for 30 min at room temperature followed by an acetonitrile wash. The support was dried and then incubated in 1 M triethylamine hydrofluoride in 3:1 dimethylformamide/water for 1-1.5 h at 50° C. The sample was filtered and washed with acetonitrile and dried. The support was then incubated overnight at 40° C. in 3:1 ammonium hydroxide/ethanol. The crude product was further purified using RP-HPLC to provide WV-4107.

### Example 16. Example Preparation of Oligonucleotides with Mod021

[1892] Oligonucleotide was synthesized at a scale of 10 μmol using standard cyanoethyl phosphoramidite chemistry and was left on support with protecting groups using cycle conditions for WV-942 (if cleaved and deprotected, would provide WV-942). The DMT protecting group was removed using 3% trichloroacetic acid in dichloromethane. The lipid amidite was then added to the 5′ end of the oligonucleotide on the synthesizer. During the coupling step, equal volumes of lipid amidite (e.g., 0.1 M in isobutyronitrile) and 5-ethylthio tetrazole (e.g., 0.5 M in acetonitrile) were added with a contact time of, e.g., 5 min. The coupling step was optionally repeated a second time. Sulfurization was performed using 0.1 M DDTT in pyridine. The oligonucleotide was cleaved and deprotected using AMA condition (ammonium hydroxide/40% aqueous methylamine 1:1 v/v) to provide WV-2588.

### Example 17. Example Preparation of Oligonucleotides with Mod030, Mod031, Mod032 and Mod033

[1893] Oligonucleotides were synthesized using cyanoethyl phosphoramidite chemistry as for WV-2735 and were left on support with the protecting group on (if cleaved and deprotected, would provide WV-2735). The 5′-DMT protecting group was removed using 3% trichloroacetic acid in dichloromethane. The lipid amidites were then added to the 5′ end of the oligonucleotide on the synthesizer. During the coupling step, equal volumes of lipid amidite (0.1M in isobutyronitrile or dichloromethane) and 5-ethylthio tetrazole (0.5M in acetonitrile) were added with a contact time of 10 min. The coupling step was repeated again. Oxidation was performed using 0.02 M I₂ in THF/pyridine/water. The oligonucleotides were de-protected with 20% diethylamine in acetonitrile wash followed by an acetonitrile wash. The oligonucleotides were cleaved from the support and further de-protected in ammonium hydroxide at 50° C. overnight.

[1894] Product oligonucleotides were characterized in various chemical analyses, e.g., UV, HPLC-MS, etc., (for example MS data, see Table 6) and biological assays, e.g., those described herein. Following similar procedures and/or using widely known and practiced technologies in the art, other example provided oligonucleotides were or can be readily prepared and characterized in accordance with the present disclosure.

### EQUIVALENTS

[1895] Having described some illustrative embodiments of the disclosure, it should be apparent to those skilled in the art that the foregoing is merely illustrative and not limiting, having been presented by way of example only. Numerous modifications and other illustrative embodiments are within the scope of one of ordinary skill in the art and are contemplated as falling within the scope of the disclosure. In particular, although many of the examples presented herein involve specific combinations of method acts or system elements, it should be understood that those acts and those elements may be combined in other ways to accomplish the same objectives. Acts, elements, and features discussed only in connection with one embodiment are not intended to be excluded from a similar role in other embodiments. Further, for the one or more means-plus-function limitations recited in the following claims, the means are not intended to be limited to the means disclosed herein for performing the recited function, but are intended to cover in scope any means, known now or later developed, for performing the recited function.

[1896] Use of ordinal terms such as “first”, “second”, “third”, etc., in the claims to modify a claim element does not by itself connote any priority, precedence, or order of one claim element over another or the temporal order in which acts of a method are performed, but are used merely as labels to distinguish one claim element having a certain name from another element having a same name (but for use of the ordinal term) to distinguish the claim elements. Similarly, use of a), b), etc., or i), ii), etc. does not by itself connote any priority, precedence, or order of steps in the claims. Similarly, the use of these terms in the specification does not by itself connote any required priority, precedence, or order.

[1897] The foregoing written specification is considered to be sufficient to enable one skilled in the art to practice the invention. The present disclosure is not to be limited in scope by examples provided, since the examples are intended as a single illustration of one aspect of the invention and other functionally equivalent embodiments are within the scope of the invention. Various modifications of the invention in addition to those shown and described herein will become apparent to those skilled in the art from the foregoing description and fall within the scope of the appended claims. The advantages and objects of the invention are not necessarily encompassed by each embodiment of the invention.

1.-5. (canceled)

6. A chirally controlled oligonucleotide composition comprising a plurality of oligonucleotides, wherein oligonucleotides of the plurality share:
1) a common base sequence;
2) a common pattern of backbone linkages; and
3) a common pattern of backbone phosphorus modifications;
wherein:
oligonucleotides of the plurality each comprise two or more consecutive 2′-F modified sugars;
50% or more of sugar moieties in each oligonucleotide of the plurality are 2′-F modified sugars;
oligonucleotides of the plurality share the same stereochemistry at five or more chiral internucleotidic linkages;
one or more-oligonucleotides of the plurality are individually conjugated to a lipid, wherein the lipid comprises an optionally substituted C₁₀-C₆₀ linear, saturated or partially unsaturated aliphatic chain.

7.-9. (canceled)

10. The composition of claim 6, wherein the plurality of oligonucleotides share the same stereochemistry at each chiral internucleotidic linkage.

11. (canceled)

12. The composition of claim 6, wherein the plurality of oligonucleotides share a common pattern of sugar modification, which comprises 5 or more consecutive 2′-F.

13.-15. (canceled)

16. A method of delivering an oligonucleotide to a muscle cell or tissue in a human subject, comprising:
(a) providing a composition of claim 6; and
(b) administering the composition to the human subject such that the oligonucleotide is delivered to a muscle cell or tissue in the subject.

17. A method of modulating the level of a transcript or gene product of a gene in a cell, the method comprising the step of contacting the cell with a composition claim 6, wherein the biologically active agent is capable of modulating the level of the transcript or gene product.

18. A method for treating a sign and/or symptom of a disease, disorder, or condition in a subject selected from cancer, a proliferative disease, disorder, or condition, a metabolic disease, disorder, or condition, an inflammatory disease, disorder, or condition, and a viral infection by providing a composition of claim 6 and administering the composition to the subject.

19.-21. (canceled)

22. The composition of claim 6, wherein each oligonucleotide of the plurality is at least 15 nucleotides in length.

23. The composition of claim 6, wherein each oligonucleotide of the plurality comprises 10 or more modified internucleotidic linkages.

24. The composition of claim 23, wherein each modified internucleotidic linkage is independently a phosphorothioate linkage.

25. The composition of claim 24, wherein at least about 80% phosphorothioate internucleotidic linkages of each oligonucleotide of the plurality are of the Sp configuration.

26. The composition of claim 24, wherein at least about 90% phosphorothioate internucleotidic linkages of each oligonucleotide of the plurality are of the Sp configuration.

27. The composition of claim 6, wherein oligonucleotides of the plurality comprise one or more natural phosphate linkages.

28. The composition of claim 6, wherein oligonucleotides of the plurality comprise one or more 2′-OR¹ modified sugars, wherein R¹ is optionally substituted C₁₋₆ aliphatic.

29. The composition of claim 28, wherein oligonucleotides of the plurality comprise one or more 2′-OMe modified sugars.

30. The composition of claim 6, wherein oligonucleotides of the plurality are identical.

31. A pharmaceutical composition comprising the composition of claim 6 and at least one pharmaceutically acceptable inactivate ingredient selected from pharmaceutically acceptable diluents, pharmaceutically acceptable excipients, and pharmaceutically acceptable carriers.

32. The pharmaceutical composition of claim 31, wherein each oligonucleotide of the plurality is independently and optionally a pharmaceutically acceptable salt.

The application's sequence listing, which the Patent Office published only in electronic form, follows.

SEQUENCE LISTING (2434 sequences)

SEQ ID NO: 1 - RNA, 20 nt, synthetic construct
  misc_feature 1..20: note = Description of Artificial Sequence: Synthetic oligonucleotide
  source 1..20: mol_type = other RNA
tcaaggaagatggcatttct

SEQ ID NO: 2 - protein, 13 aa, synthetic construct
  REGION 1..13: note = Description of Artificial Sequence: Synthetic peptide
GRKKRRQRRRPPQ

SEQ ID NO: 3 - DNA, 20 bp, synthetic construct
  misc_feature 1..20: note = Description of Artificial Sequence: Synthetic oligonucleotide
  source 1..20: mol_type = other DNA
gcctcagtctgcttcgcacc

SEQ ID NO: 4 - DNA, 20 bp, synthetic construct
  misc_feature 1..20: note = Description of Artificial Sequence: Synthetic oligonucleotide
  source 1..20: mol_type = other DNA
gcctcagtctgcttcgcacc

SEQ ID NO: 5 - DNA, 13 bp, synthetic construct
  misc_feature 1..13: note = Description of Artificial Sequence: Synthetic oligonucleotide
  source 1..13: mol_type = other DNA
aatcgatcgatcg

SEQ ID NO: 6 - DNA, 20 bp, synthetic construct
  misc_feature 1..20: note = Description of Artificial Sequence: Synthetic oligonucleotide
  source 1..20: mol_type = other DNA
gcctcagtctgcttcgcacc

SEQ ID NO: 7 - DNA, 20 bp, synthetic construct
  misc_feature 1..20: note = Description of Artificial Sequence: Synthetic oligonucleotide
  source 1..20: mol_type = other DNA
gcctcagtctgcttcgcacc

SEQ ID NO: 8 - RNA, 20 nt, synthetic construct
  misc_feature 1..20: note = Description of Artificial Sequence: Synthetic oligonucleotide
  source 1..20: mol_type = other RNA
ggcacaagggcacagacttc

SEQ ID NO: 9 - DNA, 30 bp, synthetic construct
  misc_feature 1..30: note = Description of Artificial Sequence: Synthetic oligonucleotide
  source 1..30: mol_type = other DNA
ctccaacatcaaggaagatggcatttctag

SEQ ID NO: 10 - RNA, 24 nt, synthetic construct
  misc_feature 1..24: note = Description of Artificial Sequence: Synthetic oligonucleotide
  source 1..24: mol_type = other RNA
cccattttgtgaatgttttctttt

SEQ ID NO: 11 - RNA, 22 nt, synthetic construct
  misc_feature 1..22: note = Description of Artificial Sequence: Synthetic oligonucleotide
  source 1..22: mol_type = other RNA
ttgtgtatttacccattttgtg

SEQ ID NO: 12 - RNA, 20 nt, synthetic construct
  misc_feature 1..20: note = Description of Artificial Sequence: Synthetic oligonucleotide
  source 1..20: mol_type = other RNA
tatcctctgaatgtcgcatc

SEQ ID NO: 13 - RNA, 20 nt, synthetic construct
  misc_feature 1..20: note = Description of Artificial Sequence: Synthetic oligonucleotide
  source 1..20: mol_type = other RNA
ggttatcctctgaatgtcgc

SEQ ID NO: 14 - RNA, 19 nt, synthetic construct
  misc_feature 1..19: note = Description of Artificial Sequence: Synthetic oligonucleotide
  source 1..19: mol_type = other RNA
gagccttttttcttctttg

SEQ ID NO: 15 - RNA, 19 nt, synthetic construct
  misc_feature 1..19: note = Description of Artificial Sequence: Synthetic oligonucleotide
  source 1..19: mol_type = other RNA
tcctttcgtctctgggctc

SEQ ID NO: 16 - RNA, 19 nt, synthetic construct
  misc_feature 1..19: note = Description of Artificial Sequence: Synthetic oligonucleotide
  source 1..19: mol_type = other RNA
ctcctctttcttcttctgc

SEQ ID NO: 17 - RNA, 20 nt, synthetic construct
  misc_feature 1..20: note = Description of Artificial Sequence: Synthetic oligonucleotide
  source 1..20: mol_type = other RNA
cttcgaaactgagcaaattt

SEQ ID NO: 18 - RNA, 17 nt, synthetic construct
  misc_feature 1..17: note = Description of Artificial Sequence: Synthetic oligonucleotide
  source 1..17: mol_type = other RNA
cttgtgagacatgagtg

SEQ ID NO: 19 - RNA, 18 nt, synthetic construct
  misc_feature 1..18: note = Description of Artificial Sequence: Synthetic oligonucleotide
  source 1..18: mol_type = other RNA
cagagactcctcttgctt

SEQ ID NO: 20 - RNA, 18 nt, synthetic construct
  misc_feature 1..18: note = Description of Artificial Sequence: Synthetic oligonucleotide
  source 1..18: mol_type = other RNA
tgctgctgtcttcttgct

SEQ ID NO: 21 - RNA, 19 nt, synthetic construct
  misc_feature 1..19: note = Description of Artificial Sequence: Synthetic oligonucleotide
  source 1..19: mol_type = other RNA
ttgttaactttttcccatt

SEQ ID NO: 22 - RNA, 19 nt, synthetic construct
  misc_feature 1..19: note = Description of Artificial Sequence: Synthetic oligonucleotide
  source 1..19: mol_type = other RNA
cgccgccatttctcaacag

SEQ ID NO: 23 - DNA, 15 bp, synthetic construct
  misc_feature 1..15: note = Description of Artificial Sequence: Synthetic oligonucleotide
  source 1..15: mol_type = other DNA
tagatagctatatat

SEQ ID NO: 24 - DNA, 15 bp, synthetic construct
  misc_feature 1..15: note = Description of Artificial Sequence: Synthetic oligonucleotide
  source 1..15: mol_type = other DNA
atagatagctatata

SEQ ID NO: 25 - DNA, 15 bp, synthetic construct
  misc_feature 1..15: note = Description of Artificial Sequence: Synthetic oligonucleotide
  source 1..15: mol_type = other DNA
tatagatagctatat

SEQ ID NO: 26 - DNA, 15 bp, synthetic construct
  misc_feature 1..15: note = Description of Artificial Sequence: Synthetic oligonucleotide
  source 1..15: mol_type = other DNA
atatagatagctata

SEQ ID NO: 27 - DNA, 15 bp, synthetic construct
  misc_feature 1..15: note = Description of Artificial Sequence: Synthetic oligonucleotide
  source 1..15: mol_type = other DNA
gatatagatagctat

SEQ ID NO: 28 - DNA, 12 bp, synthetic construct
  misc_feature 1..12: note = Description of Artificial Sequence: Synthetic oligonucleotide
  source 1..12: mol_type = other DNA
atagatagctat

SEQ ID NO: 29 - DNA, 15 bp, synthetic construct
  misc_feature 1..15: note = Description of Artificial Sequence: Synthetic oligonucleotide
  source 1..15: mol_type = other DNA
agatatagatagcta

SEQ ID NO: 30 - DNA, 12 bp, synthetic construct
  misc_feature 1..12: note = Description of Artificial Sequence: Synthetic oligonucleotide
  source 1..12: mol_type = other DNA
tatagatagcta

SEQ ID NO: 31 - DNA, 15 bp, synthetic construct
  misc_feature 1..15: note = Description of Artificial Sequence: Synthetic oligonucleotide
  source 1..15: mol_type = other DNA
tagatatagatagct

SEQ ID NO: 32 - DNA, 12 bp, synthetic construct
  misc_feature 1..12: note = Description of Artificial Sequence: Synthetic oligonucleotide
  source 1..12: mol_type = other DNA
atatagatagct

SEQ ID NO: 33 - DNA, 15 bp, synthetic construct
  misc_feature 1..15: note = Description of Artificial Sequence: Synthetic oligonucleotide
  source 1..15: mol_type = other DNA
atagatatagatagc

SEQ ID NO: 34 - DNA, 12 bp, synthetic construct
  misc_feature 1..12: note = Description of Artificial Sequence: Synthetic oligonucleotide
  source 1..12: mol_type = other DNA
gatatagatagc

SEQ ID NO: 35 - DNA, 15 bp, synthetic construct
  misc_feature 1..15: note = Description of Artificial Sequence: Synthetic oligonucleotide
  source 1..15: mol_type = other DNA
tatagatatagatag

SEQ ID NO: 36 - DNA, 12 bp, synthetic construct
  misc_feature 1..12: note = Description of Artificial Sequence: Synthetic oligonucleotide
  source 1..12: mol_type = other DNA
agatatagatag

SEQ ID NO: 37 - DNA, 15 bp, synthetic construct
  misc_feature 1..15: note = Description of Artificial Sequence: Synthetic oligonucleotide
  source 1..15: mol_type = other DNA
atatagatatagata

SEQ ID NO: 38 - DNA, 12 bp, synthetic construct
  misc_feature 1..12: note = Description of Artificial Sequence: Synthetic oligonucleotide
  source 1..12: mol_type = other DNA
tagatatagata

SEQ ID NO: 39 - DNA, 15 bp, synthetic construct
  misc_feature 1..15: note = Description of Artificial Sequence: Synthetic oligonucleotide
  source 1..15: mol_type = other DNA
tatatagatatagat

SEQ ID NO: 40 - DNA, 12 bp, synthetic construct
  misc_feature 1..12: note = Description of Artificial Sequence: Synthetic oligonucleotide
  source 1..12: mol_type = other DNA
atagatatagat

SEQ ID NO: 41 - DNA, 12 bp, synthetic construct
  misc_feature 1..12: note = Description of Artificial Sequence: Synthetic oligonucleotide
  source 1..12: mol_type = other DNA
tatagatataga

SEQ ID NO: 42 - DNA, 12 bp, synthetic construct
  misc_feature 1..12: note = Description of Artificial Sequence: Synthetic oligonucleotide
  source 1..12: mol_type = other DNA
atatagatatag

SEQ ID NO: 43 - DNA, 15 bp, synthetic construct
  misc_feature 1..15: note = Description of Artificial Sequence: Synthetic oligonucleotide
  source 1..15: mol_type = other DNA
atagctatatagata

SEQ ID NO: 44 - DNA, 15 bp, synthetic construct
  misc_feature 1..15: note = Description of Artificial Sequence: Synthetic oligonucleotide
  source 1..15: mol_type = other DNA
aaaaaatagctatat

SEQ ID NO: 45 - DNA, 15 bp, synthetic construct
  misc_feature 1..15: note = Description of Artificial Sequence: Synthetic oligonucleotide
  source 1..15: mol_type = other DNA
gttaaaaaaaatagc

SEQ ID NO: 46 - DNA, 15 bp, synthetic construct
  misc_feature 1..15: note = Description of Artificial Sequence: Synthetic oligonucleotide
  source 1..15: mol_type = other DNA
aggaagttaaaaaaa

SEQ ID NO: 47 - DNA, 15 bp, synthetic construct
  misc_feature 1..15: note = Description of Artificial Sequence: Synthetic oligonucleotide
  source 1..15: mol_type = other DNA
aataaaggaagttaa

SEQ ID NO: 48 - DNA, 15 bp, synthetic construct
  misc_feature 1..15: note = Description of Artificial Sequence: Synthetic oligonucleotide
  source 1..15: mol_type = other DNA
aggaaaataaaggaa

SEQ ID NO: 49 - DNA, 15 bp, synthetic construct
  misc_feature 1..15: note = Description of Artificial Sequence: Synthetic oligonucleotide
  source 1..15: mol_type = other DNA
gtgtaaggaaaataa

SEQ ID NO: 50 - DNA, 15 bp, synthetic construct
  misc_feature 1..15: note = Description of Artificial Sequence: Synthetic oligonucleotide
  source 1..15: mol_type = other DNA
attttgtctaaaacc

SEQ ID NO: 51 - DNA, 15 bp, synthetic construct
  misc_feature 1..15: note = Description of Artificial Sequence: Synthetic oligonucleotide
  source 1..15: mol_type = other DNA
gattttgtctaaaac

SEQ ID NO: 52 - DNA, 12 bp, synthetic construct
  misc_feature 1..12: note = Description of Artificial Sequence: Synthetic oligonucleotide
  source 1..12: mol_type = other DNA
ttttgtctaaaa

SEQ ID NO: 53 - DNA, 15 bp, synthetic construct
  misc_feature 1..15: note = Description of Artificial Sequence: Synthetic oligonucleotide
  source 1..15: mol_type = other DNA
tgattttgtctaaaa

SEQ ID NO: 54 - DNA, 12 bp, synthetic construct
  misc_feature 1..12: note = Description of Artificial Sequence: Synthetic oligonucleotide
  source 1..12: mol_type = other DNA
attttgtctaaa

SEQ ID NO: 55 - DNA, 15 bp, synthetic construct
  misc_feature 1..15: note = Description of Artificial Sequence: Synthetic oligonucleotide
  source 1..15: mol_type = other DNA
ttgattttgtctaaa

SEQ ID NO: 56 - DNA, 13 bp, synthetic construct
  misc_feature 1..13: note = Description of Artificial Sequence: Synthetic oligonucleotide
  source 1..13: mol_type = other DNA
gatttttgtctaa

SEQ ID NO: 57 - DNA, 15 bp, synthetic construct
  misc_feature 1..15: note = Description of Artificial Sequence: Synthetic oligonucleotide
  source 1..15: mol_type = other DNA
tttgattttgtctaa

SEQ ID NO: 58 - DNA, 16 bp, synthetic construct
  misc_feature 1..16: note = Description of Artificial Sequence: Synthetic oligonucleotide
  source 1..16: mol_type = other DNA
ttttgattttgtctaa

SEQ ID NO: 59 - DNA, 15 bp, synthetic construct
  misc_feature 1..15: note = Description of Artificial Sequence: Synthetic oligonucleotide
  source 1..15: mol_type = other DNA
ttttgattttgtcta

SEQ ID NO: 60 - DNA, 12 bp, synthetic construct
  misc_feature 1..12: note = Description of Artificial Sequence: Synthetic oligonucleotide
  source 1..12: mol_type = other DNA
tgattttgtcta

SEQ ID NO: 61 - DNA, 12 bp, synthetic construct
  misc_feature 1..12: note = Description of Artificial Sequence: Synthetic oligonucleotide
  source 1..12: mol_type = other DNA
ttgattttgtct

SEQ ID NO: 62 - DNA, 15 bp, synthetic construct
  misc_feature 1..15: note = Description of Artificial Sequence: Synthetic oligonucleotide
  source 1..15: mol_type = other DNA
tttttgattttgtct

SEQ ID NO: 63 - DNA, 12 bp, synthetic construct
  misc_feature 1..12: note = Description of Artificial Sequence: Synthetic oligonucleotide
  source 1..12: mol_type = other DNA
tttgattttgtc

SEQ ID NO: 64 - DNA, 15 bp, synthetic construct
  misc_feature 1..15: note = Description of Artificial Sequence: Synthetic oligonucleotide
  source 1..15: mol_type = other DNA
ctttttgattttgtc

SEQ ID NO: 65 - DNA, 12 bp, synthetic construct
  misc_feature 1..12: note = Description of Artificial Sequence: Synthetic oligonucleotide
  source 1..12: mol_type = other DNA
ttttgattttgt

SEQ ID NO: 66 - DNA, 12 bp, synthetic construct
  misc_feature 1..12: note = Description of Artificial Sequence: Synthetic oligonucleotide
  source 1..12: mol_type = other DNA
tttttgattttg

SEQ ID NO: 67 - DNA, 15 bp, synthetic construct
  misc_feature 1..15: note = Description of Artificial Sequence: Synthetic oligonucleotide
  source 1..15: mol_type = other DNA
cttctttttgatttt

SEQ ID NO: 68 - DNA, 12 bp, synthetic construct
  misc_feature 1..12: note = Description of Artificial Sequence: Synthetic oligonucleotide
  source 1..12: mol_type = other DNA
ctttttgatttt

SEQ ID NO: 69 - DNA, 12 bp, synthetic construct
  misc_feature 1..12: note = Description of Artificial Sequence: Synthetic oligonucleotide
  source 1..12: mol_type = other DNA
tctttttgattt

SEQ ID NO: 70 - DNA, 15 bp, synthetic construct
  misc_feature 1..15: note = Description of Artificial Sequence: Synthetic oligonucleotide
  source 1..15: mol_type = other DNA
ccttccttctttttg

SEQ ID NO: 71 - DNA, 15 bp, synthetic construct
  misc_feature 1..15: note = Description of Artificial Sequence: Synthetic oligonucleotide
  source 1..15: mol_type = other DNA
gagcaccttccttct

SEQ ID NO: 72 - DNA, 15 bp, synthetic construct
  misc_feature 1..15: note = Description of Artificial Sequence: Synthetic oligonucleotide
  source 1..15: mol_type = other DNA
aatgtgagcaccttc

SEQ ID NO: 73 - DNA, 15 bp, synthetic construct
  misc_feature 1..15: note = Description of Artificial Sequence: Synthetic oligonucleotide
  source 1..15: mol_type = other DNA
taaggaatgtgagca

SEQ ID NO: 74 - DNA, 18 bp, synthetic construct
  misc_feature 1..18: note = Description of Artificial Sequence: Synthetic oligonucleotide
  source 1..18: mol_type = other DNA
aatttaaggaatgtgagc

SEQ ID NO: 75 - DNA, 15 bp, synthetic construct
  misc_feature 1..15: note = Description of Artificial Sequence: Synthetic oligonucleotide
  source 1..15: mol_type = other DNA
ttaaggaatgtgagc

SEQ ID NO: 76 - DNA, 18 bp, synthetic construct
  misc_feature 1..18: note = Description of Artificial Sequence: Synthetic oligonucleotide
  source 1..18: mol_type = other DNA
taatttaaggaatgtgag

SEQ ID NO: 77 - DNA, 15 bp, synthetic construct
  misc_feature 1..15: note = Description of Artificial Sequence: Synthetic oligonucleotide
  source 1..15: mol_type = other DNA
tttaaggaatgtgag

SEQ ID NO: 78 - DNA, 12 bp, synthetic construct
  misc_feature 1..12: note = Description of Artificial Sequence: Synthetic oligonucleotide
  source 1..12: mol_type = other DNA
aaggaatgtgag

SEQ ID NO: 79 - DNA, 18 bp, synthetic construct
  misc_feature 1..18: note = Description of Artificial Sequence: Synthetic oligonucleotide
  source 1..18: mol_type = other DNA
ttaatttaaggaatgtga

SEQ ID NO: 80 - DNA, 15 bp, synthetic construct
  misc_feature 1..15: note = Description of Artificial Sequence: Synthetic oligonucleotide
  source 1..15: mol_type = other DNA
atttaaggaatgtga

SEQ ID NO: 81 - DNA, 12 bp, synthetic construct
  misc_feature 1..12: note = Description of Artificial Sequence: Synthetic oligonucleotide
  source 1..12: mol_type = other DNA
taaggaatgtga

SEQ ID NO: 82 - DNA, 18 bp, synthetic construct
  misc_feature 1..18: note = Description of Artificial Sequence: Synthetic oligonucleotide
  source 1..18: mol_type = other DNA
cttaatttaaggaatgtg

SEQ ID NO: 83 - DNA, 15 bp, synthetic construct
  misc_feature 1..15: note = Description of Artificial Sequence: Synthetic oligonucleotide
  source 1..15: mol_type = other DNA
aatttaaggaatgtg

SEQ ID NO: 84 - DNA, 12 bp, synthetic construct
  misc_feature 1..12: note = Description of Artificial Sequence: Synthetic oligonucleotide
  source 1..12: mol_type = other DNA
ttaaggaatgtg

SEQ ID NO: 85 - DNA, 15 bp, synthetic construct
  misc_feature 1..15: note = Description of Artificial Sequence: Synthetic oligonucleotide
  source 1..15: mol_type = other DNA
taatttaaggaatgt

SEQ ID NO: 86 - DNA, 18 bp, synthetic construct
  misc_feature 1..18: note = Description of Artificial Sequence: Synthetic oligonucleotide
  source 1..18: mol_type = other DNA
ccttaatttaaggaatgt

SEQ ID NO: 87 - DNA, 12 bp, synthetic construct
  misc_feature 1..12: note = Description of Artificial Sequence: Synthetic oligonucleotide
  source 1..12: mol_type = other DNA
tttaaggaatgt

SEQ ID NO: 88 - DNA, 15 bp, synthetic construct
  misc_feature 1..15: note = Description of Artificial Sequence: Synthetic oligonucleotide
  source 1..15: mol_type = other DNA
ttaatttaaggaatg

SEQ ID NO: 89 - DNA, 12 bp, synthetic construct
  misc_feature 1..12: note = Description of Artificial Sequence: Synthetic oligonucleotide
  source 1..12: mol_type = other DNA
atttaaggaatg

SEQ ID NO: 90 - DNA, 15 bp, synthetic construct
  misc_feature 1..15: note = Description of Artificial Sequence: Synthetic oligonucleotide
  source 1..15: mol_type = other DNA
cttaatttaaggaat

SEQ ID NO: 91 - DNA, 12 bp, synthetic construct
  misc_feature 1..12: note = Description of Artificial Sequence: Synthetic oligonucleotide
  source 1..12: mol_type = other DNA
aatttaaggaat

SEQ ID NO: 92 - DNA, 15 bp, synthetic construct
  misc_feature 1..15: note = Description of Artificial Sequence: Synthetic oligonucleotide
  source 1..15: mol_type = other DNA
ccttaatttaaggaa

SEQ ID NO: 93 - DNA, 12 bp, synthetic construct
  misc_feature 1..12: note = Description of Artificial Sequence: Synthetic oligonucleotide
  source 1..12: mol_type = other DNA
taatttaaggaa

SEQ ID NO: 94 - DNA, 15 bp, synthetic construct
  misc_feature 1..15: note = Description of Artificial Sequence: Synthetic oligonucleotide
  source 1..15: mol_type = other DNA
tccttaatttaagga

SEQ ID NO: 95 - DNA, 12 bp, synthetic construct
  misc_feature 1..12: note = Description of Artificial Sequence: Synthetic oligonucleotide
  source 1..12: mol_type = other DNA
ttaatttaagga

SEQ ID NO: 96 - DNA, 12 bp, synthetic construct
  misc_feature 1..12: note = Description of Artificial Sequence: Synthetic oligonucleotide
  source 1..12: mol_type = other DNA
cttaatttaagg

SEQ ID NO: 97 - DNA, 12 bp, synthetic construct
  misc_feature 1..12: note = Description of Artificial Sequence: Synthetic oligonucleotide
  source 1..12: mol_type = other DNA
ccttaatttaag

SEQ ID NO: 98 - DNA, 15 bp, synthetic construct
  misc_feature 1..15: note = Description of Artificial Sequence: Synthetic oligonucleotide
  source 1..15: mol_type = other DNA
tgctggcagacttac

SEQ ID NO: 99 - DNA, 15 bp, synthetic construct
  misc_feature 1..15: note = Description of Artificial Sequence: Synthetic oligonucleotide
  source 1..15: mol_type = other DNA
cataatgctggcaga

SEQ ID NO: 100 - DNA, 15 bp, synthetic construct
  misc_feature 1..15: note = Description of Artificial Sequence: Synthetic oligonucleotide
  source 1..15: mol_type = other DNA
tcataatgctggcag

SEQ ID NO: 101 - DNA, 15 bp, synthetic construct
  misc_feature 1..15: note = Description of Artificial Sequence: Synthetic oligonucleotide
  source 1..15: mol_type = other DNA
ttcataatgctggca

SEQ ID NO: 102 - DNA, 15 bp, synthetic construct
  misc_feature 1..15: note = Description of Artificial Sequence: Synthetic oligonucleotide
  source 1..15: mol_type = other DNA
tttcataatgctggc

SEQ ID NO: 103 - DNA, 20 bp, synthetic construct
  misc_feature 1..20: note = Description of Artificial Sequence: Synthetic oligonucleotide
  source 1..20: mol_type = other DNA
attcactttcataatgctgg

SEQ ID NO: 104 - DNA, 15 bp, synthetic construct
  misc_feature 1..15: note = Description of Artificial Sequence: Synthetic oligonucleotide
  source 1..15: mol_type = other DNA
ctttcataatgctgg

SEQ ID NO: 105 - DNA, 12 bp, synthetic construct
  misc_feature 1..12: note = Description of Artificial Sequence: Synthetic oligonucleotide
  source 1..12: mol_type = other DNA
tcataatgctgg

SEQ ID NO: 106 - DNA, 15 bp, synthetic construct
  misc_feature 1..15: note = Description of Artificial Sequence: Synthetic oligonucleotide
  source 1..15: mol_type = other DNA
actttcataatgctg

SEQ ID NO: 107 - DNA, 12 bp, synthetic construct
  misc_feature 1..12: note = Description of Artificial Sequence: Synthetic oligonucleotide
  source 1..12: mol_type = other DNA
ttcataatgctg

SEQ ID NO: 108 - DNA, 15 bp, synthetic construct
  misc_feature 1..15: note = Description of Artificial Sequence: Synthetic oligonucleotide
  source 1..15: mol_type = other DNA
cactttcataatgct

SEQ ID NO: 109 - DNA, 12 bp, synthetic construct
  misc_feature 1..12: note = Description of Artificial Sequence: Synthetic oligonucleotide
  source 1..12: mol_type = other DNA
tttcataatgct

SEQ ID NO: 110 - DNA, 15 bp, synthetic construct
  misc_feature 1..15: note = Description of Artificial Sequence: Synthetic oligonucleotide
  source 1..15: mol_type = other DNA
tcactttcataatgc

SEQ ID NO: 111 - DNA, 12 bp, synthetic construct
  misc_feature 1..12: note = Description of Artificial Sequence: Synthetic oligonucleotide
  source 1..12: mol_type = other DNA
gtttcataatgc

SEQ ID NO: 112 - DNA, 15 bp, synthetic construct
  misc_feature 1..15: note = Description of Artificial Sequence: Synthetic oligonucleotide
  source 1..15: mol_type = other DNA
ttcactttcataatg

SEQ ID NO: 113 - DNA, 12 bp, synthetic construct
  misc_feature 1..12: note = Description of Artificial Sequence: Synthetic oligonucleotide
  source 1..12: mol_type = other DNA
actttcataatg

SEQ ID NO: 114 - DNA, 15 bp, synthetic construct
  misc_feature 1..15: note = Description of Artificial Sequence: Synthetic oligonucleotide
  source 1..15: mol_type = other DNA
attcactttcataat

SEQ ID NO: 115 - DNA, 12 bp, synthetic construct
  misc_feature 1..12: note = Description of Artificial Sequence: Synthetic oligonucleotide
  source 1..12: mol_type = other DNA
cactttcataat

SEQ ID NO: 116 - DNA, 15 bp, synthetic construct
  misc_feature 1..15: note = Description of Artificial Sequence: Synthetic oligonucleotide
  source 1..15: mol_type = other DNA
gattcactttcataa

SEQ ID NO: 117 - DNA, 12 bp, synthetic construct
  misc_feature 1..12: note = Description of Artificial Sequence: Synthetic oligonucleotide
  source 1..12: mol_type = other DNA
tcactttcataa

SEQ ID NO: 118 - DNA, 12 bp, synthetic construct
  misc_feature 1..12: note = Description of Artificial Sequence: Synthetic oligonucleotide
  source 1..12: mol_type = other DNA
ttcactttcata

SEQ ID NO: 119 - DNA, 12 bp, synthetic construct
  misc_feature 1..12: note = Description of Artificial Sequence: Synthetic oligonucleotide
  source 1..12: mol_type = other DNA
attcactttcat

SEQ ID NO: 120 - DNA, 15 bp, synthetic construct
  misc_feature 1..15: note = Description of Artificial Sequence: Synthetic oligonucleotide
  source 1..15: mol_type = other DNA
agtaagattcacttt

SEQ ID NO: 121 - DNA, 15 bp, synthetic construct
  misc_feature 1..15: note = Description of Artificial Sequence: Synthetic oligonucleotide
  source 1..15: mol_type = other DNA
acaaaagtaagattc

SEQ ID NO: 122 - DNA, 15 bp, synthetic construct
  misc_feature 1..15: note = Description of Artificial Sequence: Synthetic oligonucleotide
  source 1..15: mol_type = other DNA
gttttacaaaagtaa

SEQ ID NO: 123 - DNA, 15 bp, synthetic construct
  misc_feature 1..15: note = Description of Artificial Sequence: Synthetic oligonucleotide
  source 1..15: mol_type = other DNA
ataaagttttacaaa

SEQ ID NO: 124 - DNA, 15 bp, synthetic construct
  misc_feature 1..15: note = Description of Artificial Sequence: Synthetic oligonucleotide
  source 1..15: mol_type = other DNA
aaaccataaagtttt

SEQ ID NO: 125 - DNA, 15 bp, synthetic construct
  misc_feature 1..15: note = Description of Artificial Sequence: Synthetic oligonucleotide
  source 1..15: mol_type = other DNA
tccacaaaccataaa

SEQ ID NO: 126 - DNA, 20 bp, synthetic construct
  misc_feature 1..20: note = Description of Artificial Sequence: Synthetic oligonucleotide
  source 1..20: mol_type = other DNA
attcactttcataatgctgg

SEQ ID NO: 127 - DNA, 20 bp, synthetic construct
  misc_feature 1..20: note = Description of Artificial Sequence: Synthetic oligonucleotide
  source 1..20: mol_type = other DNA
attcactttcataatgctgg

SEQ ID NO: 128 - DNA, 20 bp, synthetic construct
  misc_feature 1..20: note = Description of Artificial Sequence: Synthetic oligonucleotide
  source 1..20: mol_type = other DNA
attcactttcataatgctgg

SEQ ID NO: 129 - DNA, 20 bp, synthetic construct
  misc_feature 1..20: note = Description of Artificial Sequence: Synthetic oligonucleotide
  source 1..20: mol_type = other DNA
attcactttcataatgctgg

SEQ ID NO: 130 - DNA, 20 bp, synthetic construct
  misc_feature 1..20: note = Description of Artificial Sequence: Synthetic oligonucleotide
  source 1..20: mol_type = other DNA
attcactttcataatgctgg

SEQ ID NO: 131 - DNA, 20 bp, synthetic construct
  misc_feature 1..20: note = Description of Artificial Sequence: Synthetic oligonucleotide
  source 1..20: mol_type = other DNA
attcactttcataatgctgg

SEQ ID NO: 132 - DNA, 20 bp, synthetic construct
  misc_feature 1..20: note = Description of Artificial Sequence: Synthetic oligonucleotide
  source 1..20: mol_type = other DNA
attcactttcataatgctgg

SEQ ID NO: 133 - DNA, 20 bp, synthetic construct
  misc_feature 1..20: note = Description of Artificial Sequence: Synthetic oligonucleotide
  source 1..20: mol_type = other DNA
attcactttcataatgctgg

SEQ ID NO: 134 - DNA, 17 bp, synthetic construct
  misc_feature 1..17: note = Description of Artificial Sequence: Synthetic oligonucleotide
  source 1..17: mol_type = other DNA
cactttcataatgctgg

SEQ ID NO: 135 - DNA, 17 bp, synthetic construct
  misc_feature 1..17: note = Description of Artificial Sequence: Synthetic oligonucleotide
  source 1..17: mol_type = other DNA
cactttcataatgctgg

SEQ ID NO: 136 - DNA, 17 bp, synthetic construct
  misc_feature 1..17: note = Description of Artificial Sequence: Synthetic oligonucleotide
  source 1..17: mol_type = other DNA
cactttcataatgctgg

SEQ ID NO: 137 - DNA, 17 bp, synthetic construct
  misc_feature 1..17: note = Description of Artificial Sequence: Synthetic oligonucleotide
  source 1..17: mol_type = other DNA
cactttcataatgctgg

SEQ ID NO: 138 - DNA, 17 bp, synthetic construct
  misc_feature 1..17: note = Description of Artificial Sequence: Synthetic oligonucleotide
  source 1..17: mol_type = other DNA
cactttcataatgctgg

SEQ ID NO: 139 - DNA, 17 bp, synthetic construct
  misc_feature 1..17: note = Description of Artificial Sequence: Synthetic oligonucleotide
  source 1..17: mol_type = other DNA
cactttcataatgctgg

SEQ ID NO: 140 - DNA, 17 bp, synthetic construct
  misc_feature 1..17: note = Description of Artificial Sequence: Synthetic oligonucleotide
  source 1..17: mol_type = other DNA
cactttcataatgctgg

SEQ ID NO: 141 - DNA, 17 bp, synthetic construct
  misc_feature 1..17: note = Description of Artificial Sequence: Synthetic oligonucleotide
  source 1..17: mol_type = other DNA
cactttcataatgctgg

SEQ ID NO: 142 - DNA, 17 bp, synthetic construct
  misc_feature 1..17: note = Description of Artificial Sequence: Synthetic oligonucleotide
  source 1..17: mol_type = other DNA
cactttcataatgctgg

SEQ ID NO: 143 - DNA, 17 bp, synthetic construct
  misc_feature 1..17: note = Description of Artificial Sequence: Synthetic oligonucleotide
  source 1..17: mol_type = other DNA
cactttcataatgctgg

SEQ ID NO: 144 - DNA, 14 bp, synthetic construct
  misc_feature 1..14: note = Description of Artificial Sequence: Synthetic oligonucleotide
  source 1..14: mol_type = other DNA
tttcataatgctgg

SEQ ID NO: 145 - DNA, 14 bp, synthetic construct
  misc_feature 1..14: note = Description of Artificial Sequence: Synthetic oligonucleotide
  source 1..14: mol_type = other DNA
tttcataatgctgg

SEQ ID NO: 146 - DNA, 14 bp, synthetic construct
  misc_feature 1..14: note = Description of Artificial Sequence: Synthetic oligonucleotide
  source 1..14: mol_type = other DNA
tttcataatgctgg

SEQ ID NO: 147 - DNA, 14 bp, synthetic construct
  misc_feature 1..14: note = Description of Artificial Sequence: Synthetic oligonucleotide
  source 1..14: mol_type = other DNA
tttcataatgctgg

SEQ ID NO: 148 - DNA, 14 bp, synthetic construct
  misc_feature 1..14: note = Description of Artificial Sequence: Synthetic oligonucleotide
  source 1..14: mol_type = other DNA
tttcataatgctgg

SEQ ID NO: 149 - DNA, 14 bp, synthetic construct
  misc_feature 1..14: note = Description of Artificial Sequence: Synthetic oligonucleotide
  source 1..14: mol_type = other DNA
tttcataatgctgg

SEQ ID NO: 150 - DNA, 14 bp, synthetic construct
  misc_feature 1..14: note = Description of Artificial Sequence: Synthetic oligonucleotide
  source 1..14: mol_type = other DNA
tttcataatgctgg

SEQ ID NO: 151 - DNA, 11 bp, synthetic construct
  misc_feature 1..11: note = Description of Artificial Sequence: Synthetic oligonucleotide
  source 1..11: mol_type = other DNA
aatgctggcag

SEQ ID NO: 152 - DNA, 11 bp, synthetic construct
  misc_feature 1..11: note = Description of Artificial Sequence: Synthetic oligonucleotide
  source 1..11: mol_type = other DNA
aatgctggcag

SEQ ID NO: 153 - DNA, 11 bp, synthetic construct
  misc_feature 1..11: note = Description of Artificial Sequence: Synthetic oligonucleotide
  source 1..11: mol_type = other DNA
aatgctggcag

SEQ ID NO: 154 - DNA, 11 bp, synthetic construct
  misc_feature 1..11: note = Description of Artificial Sequence: Synthetic oligonucleotide
  source 1..11: mol_type = other DNA
aatgctggcag

SEQ ID NO: 155 - DNA, 11 bp, synthetic construct
  misc_feature 1..11: note = Description of Artificial Sequence: Synthetic oligonucleotide
  source 1..11: mol_type = other DNA
aatgctggcag

SEQ ID NO: 156 - DNA, 11 bp, synthetic construct
  misc_feature 1..11: note = Description of Artificial Sequence: Synthetic oligonucleotide
  source 1..11: mol_type = other DNA
aatgctggcag

SEQ ID NO: 157 - DNA, 11 bp, synthetic construct
  misc_feature 1..11: note = Description of Artificial Sequence: Synthetic oligonucleotide
  source 1..11: mol_type = other DNA
aatgctggcag

SEQ ID NO: 158-166 - skipped (9 entries)

SEQ ID NO: 167 - DNA, 21 bp, synthetic construct
  misc_feature 1..21: note = Description of Artificial Sequence: Synthetic oligonucleotide
  source 1..21: mol_type = other DNA
ctagtatttcctgcaaatgag

SEQ ID NO: 168 - DNA, 21 bp, synthetic construct
  misc_feature 1..21: note = Description of Artificial Sequence: Synthetic oligonucleotide
  source 1..21: mol_type = other DNA
ctagtatttcctgcaaatgag

SEQ ID NO: 169 - DNA, 21 bp, synthetic construct
  misc_feature 1..21: note = Description of Artificial Sequence: Synthetic oligonucleotide
  source 1..21: mol_type = other DNA
ctagtatttcctgcaaatgag

SEQ ID NO: 170 - DNA, 21 bp, synthetic construct
  misc_feature 1..21: note = Description of Artificial Sequence: Synthetic oligonucleotide
  source 1..21: mol_type = other DNA
ctagtatttcctgcaaatgag

SEQ ID NO: 171 - DNA, 21 bp, synthetic construct
  misc_feature 1..21: note = Description of Artificial Sequence: Synthetic oligonucleotide
  source 1..21: mol_type = other DNA
ctagtatttcctgcaaatgag

SEQ ID NO: 172 - DNA, 21 bp, synthetic construct
  misc_feature 1..21: note = Description of Artificial Sequence: Synthetic oligonucleotide
  source 1..21: mol_type = other DNA
ctagtatttcctgcaaatgag

SEQ ID NO: 173 - DNA, 21 bp, synthetic construct
  misc_feature 1..21: note = Description of Artificial Sequence: Synthetic oligonucleotide
  source 1..21: mol_type = other DNA
ctagtatttcctgcaaatgag

SEQ ID NO: 174 - DNA, 21 bp, synthetic construct
  misc_feature 1..21: note = Description of Artificial Sequence: Synthetic oligonucleotide
  source 1..21: mol_type = other DNA
ctagtatttcctgcaaatgag

SEQ ID NO: 175 - DNA, 21 bp, synthetic construct
  misc_feature 1..21: note = Description of Artificial Sequence: Synthetic oligonucleotide
  source 1..21: mol_type = other DNA
ctagtatttcctgcaaatgag

SEQ ID NO: 176 - DNA, 21 bp, synthetic construct
  misc_feature 1..21: note = Description of Artificial Sequence: Synthetic oligonucleotide
  source 1..21: mol_type = other DNA
ctagtatttcctgcaaatgag

SEQ ID NO: 177 - DNA, 21 bp, synthetic construct
  misc_feature 1..21: note = Description of Artificial Sequence: Synthetic oligonucleotide
  source 1..21: mol_type = other DNA
ctagtatttcctgcaaatgag

SEQ ID NO: 178 - DNA, 21 bp, synthetic construct
  misc_feature 1..21: note = Description of Artificial Sequence: Synthetic oligonucleotide
  source 1..21: mol_type = other DNA
ccagcatttcctgcaaatgag

SEQ ID NO: 179 - DNA, 21 bp, synthetic construct
  misc_feature 1..21: note = Description of Artificial Sequence: Synthetic oligonucleotide
  source 1..21: mol_type = other DNA
ccagcatttcctgcaaatgag

SEQ ID NO: 180 - DNA, 21 bp, synthetic construct
  misc_feature 1..21: note = Description of Artificial Sequence: Synthetic oligonucleotide
  source 1..21: mol_type = other DNA
ccagcatttcctgcaaatgag

SEQ ID NO: 181 - DNA, 21 bp, synthetic construct
  misc_feature 1..21: note = Description of Artificial Sequence: Synthetic oligonucleotide
  source 1..21: mol_type = other DNA
ccagcatttcctgcaaatgag

SEQ ID NO: 182 - DNA, 21 bp, synthetic construct
  misc_feature 1..21: note = Description of Artificial Sequence: Synthetic oligonucleotide
  source 1..21: mol_type = other DNA
ccagcatttcctgcaaatgag

SEQ ID NO: 183 - DNA, 21 bp, synthetic construct
  misc_feature 1..21: note = Description of Artificial Sequence: Synthetic oligonucleotide
  source 1..21: mol_type = other DNA
ccagcatttcctgcaaatgag

SEQ ID NO: 184 - DNA, 21 bp, synthetic construct
  misc_feature 1..21: note = Description of Artificial Sequence: Synthetic oligonucleotide
  source 1..21: mol_type = other DNA
ccagcatttcctgcaaatgag

SEQ ID NO: 185 - DNA, 21 bp, synthetic construct
  misc_feature 1..21: note = Description of Artificial Sequence: Synthetic oligonucleotide
  source 1..21: mol_type = other DNA
ccagcatttcctgcaaatgag

SEQ ID NO: 186 - DNA, 21 bp, synthetic construct
  misc_feature 1..21: note = Description of Artificial Sequence: Synthetic oligonucleotide
  source 1..21: mol_type = other DNA
ccagcatttcctgcaaatgag

SEQ ID NO: 187 - DNA, 25 bp, synthetic construct
  misc_feature 1..25: note = Description of Artificial Sequence: Synthetic oligonucleotide
  source 1..25: mol_type = other DNA
atgccagcatttcctgcaaatgaga

SEQ ID NO: 188 - DNA, 25 bp, synthetic construct
  misc_feature 1..25: note = Description of Artificial Sequence: Synthetic oligonucleotide
  source 1..25: mol_type = other DNA
atgccagcatttcctgcaaatgaga

SEQ ID NO: 189 - DNA, 25 bp, synthetic construct
  misc_feature 1..25: note = Description of Artificial Sequence: Synthetic oligonucleotide
  source 1..25: mol_type = other DNA
atgccagcatttcctgcaaatgaga

SEQ ID NO: 190 - DNA, 25 bp, synthetic construct
  misc_feature 1..25: note = Description of Artificial Sequence: Synthetic oligonucleotide
  source 1..25: mol_type = other DNA
atgccagcatttcctgcaaatgaga

SEQ ID NO: 191 - DNA, 25 bp, synthetic construct
  misc_feature 1..25: note = Description of Artificial Sequence: Synthetic oligonucleotide
  source 1..25: mol_type = other DNA
atgccagcatttcctgcaaatgaga

SEQ ID NO: 192 - DNA, 25 bp, synthetic construct
  misc_feature 1..25: note = Description of Artificial Sequence: Synthetic oligonucleotide
  source 1..25: mol_type = other DNA
atgccagcatttcctgcaaatgaga

SEQ ID NO: 193 - DNA, 25 bp, synthetic construct
  misc_feature 1..25: note = Description of Artificial Sequence: Synthetic oligonucleotide
  source 1..25: mol_type = other DNA
atgccagcatttcctgcaaatgaga

SEQ ID NO: 194 - DNA, 25 bp, synthetic construct
  misc_feature 1..25: note = Description of Artificial Sequence: Synthetic oligonucleotide
  source 1..25: mol_type = other DNA
atgccagcatttcctgcaaatgaga

SEQ ID NO: 195 - DNA, 25 bp, synthetic construct
  misc_feature 1..25: note = Description of Artificial Sequence: Synthetic oligonucleotide
  source 1..25: mol_type = other DNA
gctctatgccagcatttcctgcaaa

SEQ ID NO: 196 - DNA, 25 bp, synthetic construct
  misc_feature 1..25: note = Description of Artificial Sequence: Synthetic oligonucleotide
  source 1..25: mol_type = other DNA
gctctatgccagcatttcctgcaaa

SEQ ID NO: 197 - DNA, 25 bp, synthetic construct
  misc_feature 1..25: note = Description of Artificial Sequence: Synthetic oligonucleotide
  source 1..25: mol_type = other DNA
gctctatgccagcatttcctgcaaa

SEQ ID NO: 198 - DNA, 25 bp, synthetic construct
  misc_feature 1..25: note = Description of Artificial Sequence: Synthetic oligonucleotide
  source 1..25: mol_type = other DNA
gctctatgccagcatttcctgcaaa

SEQ ID NO: 199 - DNA, 25 bp, synthetic construct
  misc_feature 1..25: note = Description of Artificial Sequence: Synthetic oligonucleotide
  source 1..25: mol_type = other DNA
gctctatgccagcatttcctgcaaa

SEQ ID NO: 200 - DNA, 25 bp, synthetic construct
  misc_feature 1..25: note = Description of Artificial Sequence: Synthetic oligonucleotide
  source 1..25: mol_type = other DNA
gctctatgccagcatttcctgcaaa

SEQ ID NO: 201 - DNA, 25 bp, synthetic construct
  misc_feature 1..25: note = Description of Artificial Sequence: Synthetic oligonucleotide
  source 1..25: mol_type = other DNA
gctctatgccagcatttcctgcaaa

SEQ ID NO: 202 - DNA, 25 bp, synthetic construct
  misc_feature 1..25: note = Description of Artificial Sequence: Synthetic oligonucleotide
  source 1..25: mol_type = other DNA
gctctatgccagcatttcctgcaaa

SEQ ID NO: 203 - DNA, 25 bp, synthetic construct
  misc_feature 1..25: note = Description of Artificial Sequence: Synthetic oligonucleotide
  source 1..25: mol_type = other DNA
gctctatgccagcatttcctgcaaa

SEQ ID NO: 204 - DNA, 25 bp, synthetic construct
  misc_feature 1..25: note = Description of Artificial Sequence: Synthetic oligonucleotide
  source 1..25: mol_type = other DNA
gctctatgccagcatttcctgcaaa

SEQ ID NO: 205 - RNA, 20 nt, synthetic construct
  misc_feature 1..20: note = Description of Artificial Sequence: Synthetic oligonucleotide
  source 1..20: mol_type = other RNA
tcaaggaagatggcatttct

SEQ ID NO: 206 - RNA, 20 nt, synthetic construct
  misc_feature 1..20: note = Description of Artificial Sequence: Synthetic oligonucleotide
  source 1..20: mol_type = other RNA
tcaaggaagatggcatttct

SEQ ID NO: 207 - RNA, 20 nt, synthetic construct
  misc_feature 1..20: note = Description of Artificial Sequence: Synthetic oligonucleotide
  source 1..20: mol_type = other RNA
ggccaaacctcggcttacct

SEQ ID NO: 208 - RNA, 30 nt, synthetic construct
  misc_feature 1..30: note = Description of Artificial Sequence: Synthetic oligonucleotide
  source 1..30: mol_type = other RNA
ctccaacatcaaggaagatggcatttctag

SEQ ID NO: 209 - RNA, 25 nt, synthetic construct
  misc_feature 1..25: note = Description of Artificial Sequence: Synthetic oligonucleotide
  source 1..25: mol_type = other RNA
accagagtaacagtctgagtaggag

SEQ ID NO: 210 - RNA, 25 nt, synthetic construct
  misc_feature 1..25: note = Description of Artificial Sequence: Synthetic oligonucleotide
  source 1..25: mol_type = other RNA
caccagagtaacagtctgagtagga

SEQ ID NO: 211 - RNA, 25 nt, synthetic construct
  misc_feature 1..25: note = Description of Artificial Sequence: Synthetic oligonucleotide
  source 1..25: mol_type = other RNA
tcaccagagtaacagtctgagtagg

SEQ ID NO: 212 - RNA, 25 nt, synthetic construct
  misc_feature 1..25: note = Description of Artificial Sequence: Synthetic oligonucleotide
  source 1..25: mol_type = other RNA
gtcaccagagtaacagtctgagtag

SEQ ID NO: 213 - RNA, 25 nt, synthetic construct
  misc_feature 1..25: note = Description of Artificial Sequence: Synthetic oligonucleotide
  source 1..25: mol_type = other RNA
gttgtgtcaccagagtaacagtctg

SEQ ID NO: 214 - RNA, 25 nt, synthetic construct
  misc_feature 1..25: note = Description of Artificial Sequence: Synthetic oligonucleotide
  source 1..25: mol_type = other RNA
ggttgtgtcaccagagtaacagtct

SEQ ID NO: 215 - RNA, 25 nt, synthetic construct
  misc_feature 1..25: note = Description of Artificial Sequence: Synthetic oligonucleotide
  source 1..25: mol_type = other RNA
aggttgtgtcaccagagtaacagtc

SEQ ID NO: 216 - RNA, 25 nt, synthetic construct
  misc_feature 1..25: note = Description of Artificial Sequence: Synthetic oligonucleotide
  source 1..25: mol_type = other RNA
caggttgtgtcaccagagtaacagt

SEQ ID NO: 217 - RNA, 25 nt, synthetic construct
  misc_feature 1..25: note = Description of Artificial Sequence: Synthetic oligonucleotide
  source 1..25: mol_type = other RNA
acaggttgtgtcaccagagtaacag

SEQ ID NO: 218 - RNA, 25 nt, synthetic construct
  misc_feature 1..25: note = Description of Artificial Sequence: Synthetic oligonucleotide
  source 1..25: mol_type = other RNA
ccacaggttgtgtcaccagagtaac

SEQ ID NO: 219 - RNA, 25 nt, synthetic construct
  misc_feature 1..25: note = Description of Artificial Sequence: Synthetic oligonucleotide
  source 1..25: mol_type = other RNA
accacaggttgtgtcaccagagtaa

SEQ ID NO: 220 - RNA, 25 nt, synthetic construct
  misc_feature 1..25: note = Description of Artificial Sequence: Synthetic oligonucleotide
  source 1..25: mol_type = other RNA
aaccacaggttgtgtcaccagagta

SEQ ID NO: 221 - RNA, 25 nt, synthetic construct
  misc_feature 1..25: note = Description of Artificial Sequence: Synthetic oligonucleotide
  source 1..25: mol_type = other RNA
taaccacaggttgtgtcaccagagt

SEQ ID NO: 222 - RNA, 25 nt, synthetic construct
  misc_feature 1..25: note = Description of Artificial Sequence: Synthetic oligonucleotide
  source 1..25: mol_type = other RNA
gtaaccacaggttgtgtcaccagag

SEQ ID NO: 223 - RNA, 25 nt, synthetic construct
  misc_feature 1..25: note = Description of Artificial Sequence: Synthetic oligonucleotide
  source 1..25: mol_type = other RNA
agtaaccacaggttgtgtcaccaga

SEQ ID NO: 224 - RNA, 25 nt, synthetic construct
  misc_feature 1..25: note = Description of Artificial Sequence: Synthetic oligonucleotide
  source 1..25: mol_type = other RNA
tagtaaccacaggttgtgtcaccag

SEQ ID NO: 225 - RNA, 25 nt, synthetic construct
  misc_feature 1..25: note = Description of Artificial Sequence: Synthetic oligonucleotide
  source 1..25: mol_type = other RNA
ttagtaaccacaggttgtgtcacca

SEQ ID NO: 226 - RNA, 25 nt, synthetic construct
  misc_feature 1..25: note = Description of Artificial Sequence: Synthetic oligonucleotide
  source 1..25: mol_type = other RNA
cttagtaaccacaggttgtgtcacc

SEQ ID NO: 227 - RNA, 25 nt, synthetic construct
  misc_feature 1..25: note = Description of Artificial Sequence: Synthetic oligonucleotide
  source 1..25: mol_type = other RNA
ccttagtaaccacaggttgtgtcac

SEQ ID NO: 228 - RNA, 25 nt, synthetic construct
  misc_feature 1..25: note = Description of Artificial Sequence: Synthetic oligonucleotide
  source 1..25: mol_type = other RNA
tccttagtaaccacaggttgtgtca

SEQ ID NO: 229 - RNA, 25 nt, synthetic construct
  misc_feature 1..25: note = Description of Artificial Sequence: Synthetic oligonucleotide
  source 1..25: mol_type = other RNA
gtttccttagtaaccacaggttgtg

SEQ ID NO: 230 - RNA, 25 nt, synthetic construct
  misc_feature 1..25: note = Description of Artificial Sequence: Synthetic oligonucleotide
  source 1..25: mol_type = other RNA
agtttccttagtaaccacaggttgt

SEQ ID NO: 231 - RNA, 25 nt, synthetic construct
  misc_feature 1..25: note = Description of Artificial Sequence: Synthetic oligonucleotide
  source 1..25: mol_type = other RNA
cagtttccttagtaaccacaggttg

SEQ ID NO: 232 - RNA, 25 nt, synthetic construct
  misc_feature 1..25: note = Description of Artificial Sequence: Synthetic oligonucleotide
  source 1..25: mol_type = other RNA
gcagtttccttagtaaccacaggtt

SEQ ID NO: 233 - RNA, 25 nt, synthetic construct
  misc_feature 1..25: note = Description of Artificial Sequence: Synthetic oligonucleotide
  source 1..25: mol_type = other RNA
ggcagtttccttagtaaccacaggt

SEQ ID NO: 234 - RNA, 25 nt, synthetic construct
  misc_feature 1..25: note = Description of Artificial Sequence: Synthetic oligonucleotide
  source 1..25: mol_type = other RNA
tggcagtttccttagtaaccacagg

SEQ ID NO: 235 - RNA, 25 nt, synthetic construct
  misc_feature 1..25: note = Description of Artificial Sequence: Synthetic oligonucleotide
  source 1..25: mol_type = other RNA
atggcagtttccttagtaaccacag

SEQ ID NO: 236 - RNA, 25 nt, synthetic construct
  misc_feature 1..25: note = Description of Artificial Sequence: Synthetic oligonucleotide
  source 1..25: mol_type = other RNA
agatggcagtttccttagtaaccac

SEQ ID NO: 237 - RNA, 25 nt, synthetic construct
  misc_feature 1..25: note = Description of Artificial Sequence: Synthetic oligonucleotide
  source 1..25: mol_type = other RNA
gagatggcagtttccttagtaacca

SEQ ID NO: 238 - RNA, 25 nt, synthetic construct
  misc_feature 1..25: note = Description of Artificial Sequence: Synthetic oligonucleotide
  source 1..25: mol_type = other RNA
ggagatggcagtttccttagtaacc

SEQ ID NO: 239 - RNA, 25 nt, synthetic construct
  misc_feature 1..25: note = Description of Artificial Sequence: Synthetic oligonucleotide
  source 1..25: mol_type = other RNA
tggagatggcagtttccttagtaac

SEQ ID NO: 240 - RNA, 25 nt, synthetic construct
  misc_feature 1..25: note = Description of Artificial Sequence: Synthetic oligonucleotide
  source 1..25: mol_type = other RNA
ttggagatggcagtttccttagtaa

SEQ ID NO: 241 - RNA, 25 nt, synthetic construct
  misc_feature 1..25: note = Description of Artificial Sequence: Synthetic oligonucleotide
  source 1..25: mol_type = other RNA
tttggagatggcagtttccttagta

SEQ ID NO: 242 - RNA, 25 nt, synthetic construct
  misc_feature 1..25: note = Description of Artificial Sequence: Synthetic oligonucleotide
  source 1..25: mol_type = other RNA
agtttggagatggcagtttccttag

SEQ ID NO: 243 - RNA, 25 nt, synthetic construct
  misc_feature 1..25: note = Description of Artificial Sequence: Synthetic oligonucleotide
  source 1..25: mol_type = other RNA
tagtttggagatggcagtttcctta

SEQ ID NO: 244 - RNA, 25 nt, synthetic construct
  misc_feature 1..25: note = Description of Artificial Sequence: Synthetic oligonucleotide
  source 1..25: mol_type = other RNA
ctagtttggagatggcagtttcctt

SEQ ID NO: 245 - RNA, 25 nt, synthetic construct
  misc_feature 1..25: note = Description of Artificial Sequence: Synthetic oligonucleotide
  source 1..25: mol_type = other RNA
tctagtttggagatggcagtttcct

SEQ ID NO: 246 - RNA, 25 nt, synthetic construct
  misc_feature 1..25: note = Description of Artificial Sequence: Synthetic oligonucleotide
  source 1..25: mol_type = other RNA
ttctagtttggagatggcagtttcc

SEQ ID NO: 247 - RNA, 25 nt, synthetic construct
  misc_feature 1..25: note = Description of Artificial Sequence: Synthetic oligonucleotide
  source 1..25: mol_type = other RNA
catttctagtttggagatggcagtt

SEQ ID NO: 248 - RNA, 25 nt, synthetic construct
  misc_feature 1..25: note = Description of Artificial Sequence: Synthetic oligonucleotide
  source 1..25: mol_type = other RNA
gcatttctagtttggagatggcagt

SEQ ID NO: 249 - RNA, 25 nt, synthetic construct
  misc_feature 1..25: note = Description of Artificial Sequence: Synthetic oligonucleotide
  source 1..25: mol_type = other RNA
atggcatttctagtttggagatggc

SEQ ID NO: 250 - RNA, 25 nt, synthetic construct
  misc_feature 1..25: note = Description of Artificial Sequence: Synthetic oligonucleotide
  source 1..25: mol_type = other RNA
gaagatggcatttctagtttggaga

SEQ ID NO: 251 - RNA, 25 nt, synthetic construct
  misc_feature 1..25: note = Description of Artificial Sequence: Synthetic oligonucleotide
  source 1..25: mol_type = other RNA
aggaagatggcatttctagtttgga

SEQ ID NO: 252 - RNA, 25 nt, synthetic construct
  misc_feature 1..25: note = Description of Artificial Sequence: Synthetic oligonucleotide
  source 1..25: mol_type = other RNA
aaggaagatggcatttctagtttgg

SEQ ID NO: 253 - RNA, 25 nt, synthetic construct
  misc_feature 1..25: note = Description of Artificial Sequence: Synthetic oligonucleotide
  source 1..25: mol_type = other RNA
caaggaagatggcatttctagtttg

SEQ ID NO: 254 - RNA, 25 nt, synthetic construct
  misc_feature 1..25: note = Description of Artificial Sequence: Synthetic oligonucleotide
  source 1..25: mol_type = other RNA
catcaaggaagatggcatttctagt

SEQ ID NO: 255 - RNA, 25 nt, synthetic construct
  misc_feature 1..25: note = Description of Artificial Sequence: Synthetic oligonucleotide
  source 1..25: mol_type = other RNA
acatcaaggaagatggcatttctag

SEQ ID NO: 256 - RNA, 25 nt, synthetic construct
  misc_feature 1..25: note = Description of Artificial Sequence: Synthetic oligonucleotide
  source 1..25: mol_type = other RNA
aacatcaaggaagatggcatttcta

SEQ ID NO: 257 - RNA, 25 nt, synthetic construct
  misc_feature 1..25: note = Description of Artificial Sequence: Synthetic oligonucleotide
  source 1..25: mol_type = other RNA
caacatcaaggaagatggcatttct

SEQ ID NO: 258 - RNA, 25 nt, synthetic construct
  misc_feature 1..25: note = Description of Artificial Sequence: Synthetic oligonucleotide
  source 1..25: mol_type = other RNA
ctccaacatcaaggaagatggcatt

SEQ ID NO: 259 - RNA, 25 nt, synthetic construct
  misc_feature 1..25: note = Description of Artificial Sequence: Synthetic oligonucleotide
  source 1..25: mol_type = other RNA
acctccaacatcaaggaagatggca

SEQ ID NO: 260 - RNA, 25 nt, synthetic construct
  misc_feature 1..25: note = Description of Artificial Sequence: Synthetic oligonucleotide
  source 1..25: mol_type = other RNA
gtacctccaacatcaaggaagatgg

SEQ ID NO: 261 - RNA, 25 nt, synthetic construct
  misc_feature 1..25: note = Description of Artificial Sequence: Synthetic oligonucleotide
  source 1..25: mol_type = other RNA
aggtacctccaacatcaaggaagat

SEQ ID NO: 262 - RNA, 25 nt, synthetic construct
  misc_feature 1..25: note = Description of Artificial Sequence: Synthetic oligonucleotide
  source 1..25: mol_type = other RNA
agagcaggtacctccaacatcaagg

SEQ ID NO: 263 - RNA, 25 nt, synthetic construct
  misc_feature 1..25: note = Description of Artificial Sequence: Synthetic oligonucleotide
  source 1..25: mol_type = other RNA
cagagcaggtacctccaacatcaag

SEQ ID NO: 264 - RNA, 25 nt, synthetic construct
  misc_feature 1..25: note = Description of Artificial Sequence: Synthetic oligonucleotide
  source 1..25: mol_type = other RNA
ctgccagagcaggtacctccaacat

SEQ ID NO: 265 - RNA, 25 nt, synthetic construct
  misc_feature 1..25: note = Description of Artificial Sequence: Synthetic oligonucleotide
  source 1..25: mol_type = other RNA
tctgccagagcaggtacctccaaca

SEQ ID NO: 266 - RNA, 25 nt, synthetic construct
  misc_feature 1..25: note = Description of Artificial Sequence: Synthetic oligonucleotide
  source 1..25: mol_type = other RNA
atctgccagagcaggtacctccaac

SEQ ID NO: 267 - RNA, 25 nt, synthetic construct
  misc_feature 1..25: note = Description of Artificial Sequence: Synthetic oligonucleotide
  source 1..25: mol_type = other RNA
aatctgccagagcaggtacctccaa

SEQ ID NO: 268 - RNA, 25 nt, synthetic construct
  misc_feature 1..25: note = Description of Artificial Sequence: Synthetic oligonucleotide
  source 1..25: mol_type = other RNA
aaatctgccagagcaggtacctcca

SEQ ID NO: 269 - RNA, 25 nt, synthetic construct
  misc_feature 1..25: note = Description of Artificial Sequence: Synthetic oligonucleotide
  source 1..25: mol_type = other RNA
gaaatctgccagagcaggtacctcc

SEQ ID NO: 270 - RNA, 25 nt, synthetic construct
  misc_feature 1..25: note = Description of Artificial Sequence: Synthetic oligonucleotide
  source 1..25: mol_type = other RNA
tgaaatctgccagagcaggtacctc

SEQ ID NO: 271 - RNA, 25 nt, synthetic construct
  misc_feature 1..25: note = Description of Artificial Sequence: Synthetic oligonucleotide
  source 1..25: mol_type = other RNA
ttgaaatctgccagagcaggtacct

SEQ ID NO: 272 - RNA, 25 nt, synthetic construct
  misc_feature 1..25: note = Description of Artificial Sequence: Synthetic oligonucleotide
  source 1..25: mol_type = other RNA
cccggttgaaatctgccagagcagg

SEQ ID NO: 273 - RNA, 25 nt, synthetic construct
  misc_feature 1..25: note = Description of Artificial Sequence: Synthetic oligonucleotide
  source 1..25: mol_type = other RNA
ccaagcccggttgaaatctgccaga

SEQ ID NO: 274 - RNA, 25 nt, synthetic construct
  misc_feature 1..25: note = Description of Artificial Sequence: Synthetic oligonucleotide
  source 1..25: mol_type = other RNA
tccaagcccggttgaaatctgccag

SEQ ID NO: 275 - RNA, 25 nt, synthetic construct
  misc_feature 1..25: note = Description of Artificial Sequence: Synthetic oligonucleotide
  source 1..25: mol_type = other RNA
gtccaagcccggttgaaatctgcca

SEQ ID NO: 276 - RNA, 25 nt, synthetic construct
  misc_feature 1..25: note = Description of Artificial Sequence: Synthetic oligonucleotide
  source 1..25: mol_type = other RNA
tctgtccaagcccggttgaaatctg

SEQ ID NO: 277 - RNA, 25 nt, synthetic construct
  misc_feature 1..25: note = Description of Artificial Sequence: Synthetic oligonucleotide
  source 1..25: mol_type = other RNA
ttctgtccaagcccggttgaaatct

SEQ ID NO: 278 - RNA, 25 nt, synthetic construct
  misc_feature 1..25: note = Description of Artificial Sequence: Synthetic oligonucleotide
  source 1..25: mol_type = other RNA
gttctgtccaagcccggttgaaatc

SEQ ID NO: 279 - RNA, 25 nt, synthetic construct
  misc_feature 1..25: note = Description of Artificial Sequence: Synthetic oligonucleotide
  source 1..25: mol_type = other RNA
agttctgtccaagcccggttgaaat

SEQ ID NO: 280 - RNA, 25 nt, synthetic construct
  misc_feature 1..25: note = Description of Artificial Sequence: Synthetic oligonucleotide
  source 1..25: mol_type = other RNA
aagttctgtccaagcccggttgaaa

SEQ ID NO: 281 - RNA, 25 nt, synthetic construct
  misc_feature 1..25: note = Description of Artificial Sequence: Synthetic oligonucleotide
  source 1..25: mol_type = other RNA
taagttctgtccaagcccggttgaa

SEQ ID NO: 282 - RNA, 25 nt, synthetic construct
  misc_feature 1..25: note = Description of Artificial Sequence: Synthetic oligonucleotide
  source 1..25: mol_type = other RNA
gtaagttctgtccaagcccggttga

SEQ ID NO: 283 - RNA, 25 nt, synthetic construct
  misc_feature 1..25: note = Description of Artificial Sequence: Synthetic oligonucleotide
  source 1..25: mol_type = other RNA
ggtaagttctgtccaagcccggttg

SEQ ID NO: 284 - RNA, 25 nt, synthetic construct
  misc_feature 1..25: note = Description of Artificial Sequence: Synthetic oligonucleotide
  source 1..25: mol_type = other RNA
cggtaagttctgtccaagcccggtt

SEQ ID NO: 285 - RNA, 25 nt, synthetic construct
  misc_feature 1..25: note = Description of Artificial Sequence: Synthetic oligonucleotide
  source 1..25: mol_type = other RNA
tcggtaagttctgtccaagcccggt

SEQ ID NO: 286 - RNA, 25 nt, synthetic construct
  misc_feature 1..25: note = Description of Artificial Sequence: Synthetic oligonucleotide
  source 1..25: mol_type = other RNA
gtcggtaagttctgtccaagcccgg

SEQ ID NO: 287 - RNA, 25 nt, synthetic construct
  misc_feature 1..25: note = Description of Artificial Sequence: Synthetic oligonucleotide
  source 1..25: mol_type = other RNA
agtcggtaagttctgtccaagcccg

SEQ ID NO: 288 - RNA, 25 nt, synthetic construct
  misc_feature 1..25: note = Description of Artificial Sequence: Synthetic oligonucleotide
  source 1..25: mol_type = other RNA
cagtcggtaagttctgtccaagccc

SEQ ID NO: 289 - RNA, 25 nt, synthetic construct
  misc_feature 1..25: note = Description of Artificial Sequence: Synthetic oligonucleotide
  source 1..25: mol_type = other RNA
aaagccagtcggtaagttctgtcca

SEQ ID NO: 290 - RNA, 25 nt, synthetic construct
  misc_feature 1..25: note = Description of Artificial Sequence: Synthetic oligonucleotide
  source 1..25: mol_type = other RNA
gaaagccagtcggtaagttctgtcc

SEQ ID NO: 291 - RNA, 25 nt, synthetic construct
  misc_feature 1..25: note = Description of Artificial Sequence: Synthetic oligonucleotide
  source 1..25: mol_type = other RNA
gtcacccaccatcaccctctgtgat

SEQ ID NO: 292 - RNA, 25 nt, synthetic construct
  misc_feature 1..25: note = Description of Artificial Sequence: Synthetic oligonucleotide
  source 1..25: mol_type = other RNA
ggtcacccaccatcaccctctgtga

SEQ ID NO: 293 - RNA, 25 nt, synthetic construct
  misc_feature 1..25: note = Description of Artificial Sequence: Synthetic oligonucleotide
  source 1..25: mol_type = other RNA
aaggtcacccaccatcaccctctgt

SEQ ID NO: 294 - RNA, 25 nt, synthetic construct
  misc_feature 1..25: note = Description of Artificial Sequence: Synthetic oligonucleotide
  source 1..25: mol_type = other RNA
caaggtcacccaccatcaccctctg

SEQ ID NO: 295 - RNA, 25 nt, synthetic construct
  misc_feature 1..25: note = Description of Artificial Sequence: Synthetic oligonucleotide
  source 1..25: mol_type = other RNA
tcaaggtcacccaccatcaccctct

SEQ ID NO: 296 - RNA, 25 nt, synthetic construct
  misc_feature 1..25: note = Description of Artificial Sequence: Synthetic oligonucleotide
  source 1..25: mol_type = other RNA
ctcaaggtcacccaccatcaccctc

SEQ ID NO: 297 - RNA, 25 nt, synthetic construct
  misc_feature 1..25: note = Description of Artificial Sequence: Synthetic oligonucleotide
  source 1..25: mol_type = other RNA
cttgatcaagcagagaaagccagtc

SEQ ID NO: 298 - RNA, 25 nt, synthetic construct
  misc_feature 1..25: note = Description of Artificial Sequence: Synthetic oligonucleotide
  source 1..25: mol_type = other RNA
ataacttgatcaagcagagaaagcc

SEQ ID NO: 299 - RNA, 20 nt, synthetic construct
  misc_feature 1..20: note = Description of Artificial Sequence: Synthetic oligonucleotide
  source 1..20: mol_type = other RNA
agtaacagtctgagtaggag

SEQ ID NO: 300 - RNA, 20 nt, synthetic construct
  misc_feature 1..20: note = Description of Artificial Sequence: Synthetic oligonucleotide
  source 1..20: mol_type = other RNA
gagtaacagtctgagtagga

SEQ ID NO: 301 - RNA, 20 nt, synthetic construct
  misc_feature 1..20: note = Description of Artificial Sequence: Synthetic oligonucleotide
  source 1..20: mol_type = other RNA
agagtaacagtctgagtagg

SEQ ID NO: 302 - RNA, 20 nt, synthetic construct
  misc_feature 1..20: note = Description of Artificial Sequence: Synthetic oligonucleotide
  source 1..20: mol_type = other RNA
cagagtaacagtctgagtag

SEQ ID NO: 303 - RNA, 20 nt, synthetic construct
  misc_feature 1..20: note = Description of Artificial Sequence: Synthetic oligonucleotide
  source 1..20: mol_type = other RNA
gtcaccagagtaacagtctg

SEQ ID NO: 304 - RNA, 20 nt, synthetic construct
  misc_feature 1..20: note = Description of Artificial Sequence: Synthetic oligonucleotide
  source 1..20: mol_type = other RNA
tgtcaccagagtaacagtct

SEQ ID NO: 305 - RNA, 20 nt, synthetic construct
  misc_feature 1..20: note = Description of Artificial Sequence: Synthetic oligonucleotide
  source 1..20: mol_type = other RNA
gtgtcaccagagtaacagtc

SEQ ID NO: 306 - RNA, 20 nt, synthetic construct
  misc_feature 1..20: note = Description of Artificial Sequence: Synthetic oligonucleotide
  source 1..20: mol_type = other RNA
tgtgtcaccagagtaacagt

SEQ ID NO: 307 - RNA, 20 nt, synthetic construct
  misc_feature 1..20: note = Description of Artificial Sequence: Synthetic oligonucleotide
  source 1..20: mol_type = other RNA
ttgtgtcaccagagtaacag

SEQ ID NO: 308 - RNA, 20 nt, synthetic construct
  misc_feature 1..20: note = Description of Artificial Sequence: Synthetic oligonucleotide
  source 1..20: mol_type = other RNA
ggttgtgtcaccagagtaac

SEQ ID NO: 309 - RNA, 20 nt, synthetic construct
  misc_feature 1..20: note = Description of Artificial Sequence: Synthetic oligonucleotide
  source 1..20: mol_type = other RNA
aggttgtgtcaccagagtaa

SEQ ID NO: 310 - RNA, 20 nt, synthetic construct
  misc_feature 1..20: note = Description of Artificial Sequence: Synthetic oligonucleotide
  source 1..20: mol_type = other RNA
caggttgtgtcaccagagta

SEQ ID NO: 311 - RNA, 20 nt, synthetic construct
  misc_feature 1..20: note = Description of Artificial Sequence: Synthetic oligonucleotide
  source 1..20: mol_type = other RNA
acaggttgtgtcaccagagt

SEQ ID NO: 312 - RNA, 20 nt, synthetic construct
  misc_feature 1..20: note = Description of Artificial Sequence: Synthetic oligonucleotide
  source 1..20: mol_type = other RNA
cacaggttgtgtcaccagag

SEQ ID NO: 313 - RNA, 20 nt, synthetic construct
  misc_feature 1..20: note = Description of Artificial Sequence: Synthetic oligonucleotide
  source 1..20: mol_type = other RNA
ccacaggttgtgtcaccaga

SEQ ID NO: 314 - RNA, 20 nt, synthetic construct
  misc_feature 1..20: note = Description of Artificial Sequence: Synthetic oligonucleotide
  source 1..20: mol_type = other RNA
accacaggttgtgtcaccag

SEQ ID NO: 315 - RNA, 20 nt, synthetic construct
  misc_feature 1..20: note = Description of Artificial Sequence: Synthetic oligonucleotide
  source 1..20: mol_type = other RNA
aaccacaggttgtgtcacca

SEQ ID NO: 316 - RNA, 20 nt, synthetic construct
  misc_feature 1..20: note = Description of Artificial Sequence: Synthetic oligonucleotide
  source 1..20: mol_type = other RNA
taaccacaggttgtgtcacc

SEQ ID NO: 317 - RNA, 20 nt, synthetic construct
  misc_feature 1..20: note = Description of Artificial Sequence: Synthetic oligonucleotide
  source 1..20: mol_type = other RNA
gtaaccacaggttgtgtcac

SEQ ID NO: 318 - RNA, 20 nt, synthetic construct
  misc_feature 1..20: note = Description of Artificial Sequence: Synthetic oligonucleotide
  source 1..20: mol_type = other RNA
agtaaccacaggttgtgtca

SEQ ID NO: 319 - RNA, 20 nt, synthetic construct
  misc_feature 1..20: note = Description of Artificial Sequence: Synthetic oligonucleotide
  source 1..20: mol_type = other RNA
cttagtaaccacaggttgtg

SEQ ID NO: 320 - RNA, 20 nt, synthetic construct
  misc_feature 1..20: note = Description of Artificial Sequence: Synthetic oligonucleotide
  source 1..20: mol_type = other RNA
ccttagtaaccacaggttgt

SEQ ID NO: 321 - RNA, 20 nt, synthetic construct
  misc_feature 1..20: note = Description of Artificial Sequence: Synthetic oligonucleotide
  source 1..20: mol_type = other RNA
tccttagtaaccacaggttg

SEQ ID NO: 322 - RNA, 20 nt, synthetic construct
  misc_feature 1..20: note = Description of Artificial Sequence: Synthetic oligonucleotide
  source 1..20: mol_type = other RNA
ttccttagtaaccacaggtt

SEQ ID NO: 323 - RNA, 20 nt, synthetic construct
  misc_feature 1..20: note = Description of Artificial Sequence: Synthetic oligonucleotide
  source 1..20: mol_type = other RNA
tttccttagtaaccacaggt

SEQ ID NO: 324 - RNA, 20 nt, synthetic construct
  misc_feature 1..20: note = Description of Artificial Sequence: Synthetic oligonucleotide
  source 1..20: mol_type = other RNA
gtttccttagtaaccacagg

SEQ ID NO: 325 - RNA, 20 nt, synthetic construct
  misc_feature 1..20: note = Description of Artificial Sequence: Synthetic oligonucleotide
  source 1..20: mol_type = other RNA
agtttccttagtaaccacag

SEQ ID NO: 326 - RNA, 20 nt, synthetic construct
  misc_feature 1..20: note = Description of Artificial Sequence: Synthetic oligonucleotide
  source 1..20: mol_type = other RNA
gcagtttccttagtaaccac

SEQ ID NO: 327 - RNA, 20 nt, synthetic construct
  misc_feature 1..20: note = Description of Artificial Sequence: Synthetic oligonucleotide
  source 1..20: mol_type = other RNA
ggcagtttccttagtaacca

SEQ ID NO: 328 - RNA, 20 nt, synthetic construct
  misc_feature 1..20: note = Description of Artificial Sequence: Synthetic oligonucleotide
  source 1..20: mol_type = other RNA
tggcagtttccttagtaacc

SEQ ID NO: 329 - RNA, 20 nt, synthetic construct
  misc_feature 1..20: note = Description of Artificial Sequence: Synthetic oligonucleotide
  source 1..20: mol_type = other RNA
atggcagtttccttagtaac

SEQ ID NO: 330 - RNA, 20 nt, synthetic construct
  misc_feature 1..20: note = Description of Artificial Sequence: Synthetic oligonucleotide
  source 1..20: mol_type = other RNA
gatggcagtttccttagtaa

SEQ ID NO: 331 - RNA, 20 nt, synthetic construct
  misc_feature 1..20: note = Description of Artificial Sequence: Synthetic oligonucleotide
  source 1..20: mol_type = other RNA
agatggcagtttccttagta

SEQ ID NO: 332 - RNA, 20 nt, synthetic construct
  misc_feature 1..20: note = Description of Artificial Sequence: Synthetic oligonucleotide
  source 1..20: mol_type = other RNA
ggagatggcagtttccttag

SEQ ID NO: 333 - RNA, 20 nt, synthetic construct
  misc_feature 1..20: note = Description of Artificial Sequence: Synthetic oligonucleotide
  source 1..20: mol_type = other RNA
tggagatggcagtttcctta

SEQ ID NO: 334 - RNA, 20 nt, synthetic construct
  misc_feature 1..20: note = Description of Artificial Sequence: Synthetic oligonucleotide
  source 1..20: mol_type = other RNA
ttggagatggcagtttcctt

SEQ ID NO: 335 - RNA, 20 nt, synthetic construct
  misc_feature 1..20: note = Description of Artificial Sequence: Synthetic oligonucleotide
  source 1..20: mol_type = other RNA
tttggagatggcagtttcct

SEQ ID NO: 336 - RNA, 20 nt, synthetic construct
  misc_feature 1..20: note = Description of Artificial Sequence: Synthetic oligonucleotide
  source 1..20: mol_type = other RNA
gtttggagatggcagtttcc

SEQ ID NO: 337 - RNA, 20 nt, synthetic construct
  misc_feature 1..20: note = Description of Artificial Sequence: Synthetic oligonucleotide
  source 1..20: mol_type = other RNA
ctagtttggagatggcagtt

SEQ ID NO: 338 - RNA, 20 nt, synthetic construct
  misc_feature 1..20: note = Description of Artificial Sequence: Synthetic oligonucleotide
  source 1..20: mol_type = other RNA
tctagtttggagatggcagt

SEQ ID NO: 339 - RNA, 20 nt, synthetic construct
  misc_feature 1..20: note = Description of Artificial Sequence: Synthetic oligonucleotide
  source 1..20: mol_type = other RNA
atttctagtttggagatggc

SEQ ID NO: 340 - RNA, 20 nt, synthetic construct
  misc_feature 1..20: note = Description of Artificial Sequence: Synthetic oligonucleotide
  source 1..20: mol_type = other RNA
tggcatttctagtttggaga

SEQ ID NO: 341 - RNA, 20 nt, synthetic construct
  misc_feature 1..20: note = Description of Artificial Sequence: Synthetic oligonucleotide
  source 1..20: mol_type = other RNA
gatggcatttctagtttgga

SEQ ID NO: 342 - RNA, 20 nt, synthetic construct
  misc_feature 1..20: note = Description of Artificial Sequence: Synthetic oligonucleotide
  source 1..20: mol_type = other RNA
agatggcatttctagtttgg

SEQ ID NO: 343 - RNA, 20 nt, synthetic construct
  misc_feature 1..20: note = Description of Artificial Sequence: Synthetic oligonucleotide
  source 1..20: mol_type = other RNA
aagatggcatttctagtttg

SEQ ID NO: 344 - RNA, 20 nt, synthetic construct
  misc_feature 1..20: note = Description of Artificial Sequence: Synthetic oligonucleotide
  source 1..20: mol_type = other RNA
aggaagatggcatttctagt

SEQ ID NO: 345 - RNA, 20 nt, synthetic construct
  misc_feature 1..20: note = Description of Artificial Sequence: Synthetic oligonucleotide
  source 1..20: mol_type = other RNA
aaggaagatggcatttctag

SEQ ID NO: 346 - RNA, 20 nt, synthetic construct
  misc_feature 1..20: note = Description of Artificial Sequence: Synthetic oligonucleotide
  source 1..20: mol_type = other RNA
caaggaagatggcatttcta

SEQ ID NO: 347 - RNA, 20 nt, synthetic construct
  misc_feature 1..20: note = Description of Artificial Sequence: Synthetic oligonucleotide
  source 1..20: mol_type = other RNA
tcaaggaagatggcatttct

SEQ ID NO: 348 - RNA, 20 nt, synthetic construct
  misc_feature 1..20: note = Description of Artificial Sequence: Synthetic oligonucleotide
  source 1..20: mol_type = other RNA
acatcaaggaagatggcatt

SEQ ID NO: 349 - RNA, 20 nt, synthetic construct
  misc_feature 1..20: note = Description of Artificial Sequence: Synthetic oligonucleotide
  source 1..20: mol_type = other RNA
caacatcaaggaagatggca

SEQ ID NO: 350 - RNA, 20 nt, synthetic construct
  misc_feature 1..20: note = Description of Artificial Sequence: Synthetic oligonucleotide
  source 1..20: mol_type = other RNA
tccaacatcaaggaagatgg

SEQ ID NO: 351 - RNA, 20 nt, synthetic construct
  misc_feature 1..20: note = Description of Artificial Sequence: Synthetic oligonucleotide
  source 1..20: mol_type = other RNA
cctccaacatcaaggaagat

SEQ ID NO: 352 - RNA, 20 nt, synthetic construct
  misc_feature 1..20: note = Description of Artificial Sequence: Synthetic oligonucleotide
  source 1..20: mol_type = other RNA
aggtacctccaacatcaagg

SEQ ID NO: 353 - RNA, 20 nt, synthetic construct
  misc_feature 1..20: note = Description of Artificial Sequence: Synthetic oligonucleotide
  source 1..20: mol_type = other RNA
caggtacctccaacatcaag

SEQ ID NO: 354 - RNA, 20 nt, synthetic construct
  misc_feature 1..20: note = Description of Artificial Sequence: Synthetic oligonucleotide
  source 1..20: mol_type = other RNA
agagcaggtacctccaacat

SEQ ID NO: 355 - RNA, 20 nt, synthetic construct
  misc_feature 1..20: note = Description of Artificial Sequence: Synthetic oligonucleotide
  source 1..20: mol_type = other RNA
cagagcaggtacctccaaca

SEQ ID NO: 356 - RNA, 20 nt, synthetic construct
  misc_feature 1..20: note = Description of Artificial Sequence: Synthetic oligonucleotide
  source 1..20: mol_type = other RNA
ccagagcaggtacctccaac

SEQ ID NO: 357 - RNA, 20 nt, synthetic construct
  misc_feature 1..20: note = Description of Artificial Sequence: Synthetic oligonucleotide
  source 1..20: mol_type = other RNA
gccagagcaggtacctccaa

SEQ ID NO: 358 - RNA, 20 nt, synthetic construct
  misc_feature 1..20: note = Description of Artificial Sequence: Synthetic oligonucleotide
  source 1..20: mol_type = other RNA
tgccagagcaggtacctcca

SEQ ID NO: 359 - RNA, 20 nt, synthetic construct
  misc_feature 1..20: note = Description of Artificial Sequence: Synthetic oligonucleotide
  source 1..20: mol_type = other RNA
ctgccagagcaggtacctcc

SEQ ID NO: 360 - RNA, 20 nt, synthetic construct
  misc_feature 1..20: note = Description of Artificial Sequence: Synthetic oligonucleotide
  source 1..20: mol_type = other RNA
tctgccagagcaggtacctc

SEQ ID NO: 361 - RNA, 20 nt, synthetic construct
  misc_feature 1..20: note = Description of Artificial Sequence: Synthetic oligonucleotide
  source 1..20: mol_type = other RNA
atctgccagagcaggtacct

SEQ ID NO: 362 - RNA, 20 nt, synthetic construct
  misc_feature 1..20: note = Description of Artificial Sequence: Synthetic oligonucleotide
  source 1..20: mol_type = other RNA
ttgaaatctgccagagcagg

SEQ ID NO: 363 - RNA, 20 nt, synthetic construct
  misc_feature 1..20: note = Description of Artificial Sequence: Synthetic oligonucleotide
  source 1..20: mol_type = other RNA
cccggttgaaatctgccaga

SEQ ID NO: 364 - RNA, 20 nt, synthetic construct
  misc_feature 1..20: note = Description of Artificial Sequence: Synthetic oligonucleotide
  source 1..20: mol_type = other RNA
gcccggttgaaatctgccag

SEQ ID NO: 365 - RNA, 20 nt, synthetic construct
  misc_feature 1..20: note = Description of Artificial Sequence: Synthetic oligonucleotide
  source 1..20: mol_type = other RNA
agcccggttgaaatctgcca

SEQ ID NO: 366 - RNA, 20 nt, synthetic construct
  misc_feature 1..20: note = Description of Artificial Sequence: Synthetic oligonucleotide
  source 1..20: mol_type = other RNA
ccaagcccggttgaaatctg

SEQ ID NO: 367 - RNA, 20 nt, synthetic construct
  misc_feature 1..20: note = Description of Artificial Sequence: Synthetic oligonucleotide
  source 1..20: mol_type = other RNA
tccaagcccggttgaaatct

SEQ ID NO: 368 - RNA, 20 nt, synthetic construct
  misc_feature 1..20: note = Description of Artificial Sequence: Synthetic oligonucleotide
  source 1..20: mol_type = other RNA
gtccaagcccggttgaaatc

SEQ ID NO: 369 - RNA, 20 nt, synthetic construct
  misc_feature 1..20: note = Description of Artificial Sequence: Synthetic oligonucleotide
  source 1..20: mol_type = other RNA
tgtccaagcccggttgaaat

SEQ ID NO: 370 - RNA, 20 nt, synthetic construct
  misc_feature 1..20: note = Description of Artificial Sequence: Synthetic oligonucleotide
  source 1..20: mol_type = other RNA
ctgtccaagcccggttgaaa

SEQ ID NO: 371 - RNA, 20 nt, synthetic construct
  misc_feature 1..20: note = Description of Artificial Sequence: Synthetic oligonucleotide
  source 1..20: mol_type = other RNA
tctgtccaagcccggttgaa

SEQ ID NO: 372 - RNA, 20 nt, synthetic construct
  misc_feature 1..20: note = Description of Artificial Sequence: Synthetic oligonucleotide
  source 1..20: mol_type = other RNA
ttctgtccaagcccggttga

SEQ ID NO: 373 - RNA, 20 nt, synthetic construct
  misc_feature 1..20: note = Description of Artificial Sequence: Synthetic oligonucleotide
  source 1..20: mol_type = other RNA
gttctgtccaagcccggttg

SEQ ID NO: 374 - RNA, 20 nt, synthetic construct
  misc_feature 1..20: note = Description of Artificial Sequence: Synthetic oligonucleotide
  source 1..20: mol_type = other RNA
agttctgtccaagcccggtt

SEQ ID NO: 375 - RNA, 20 nt, synthetic construct
  misc_feature 1..20: note = Description of Artificial Sequence: Synthetic oligonucleotide
  source 1..20: mol_type = other RNA
aagttctgtccaagcccggt

SEQ ID NO: 376 - RNA, 20 nt, synthetic construct
  misc_feature 1..20: note = Description of Artificial Sequence: Synthetic oligonucleotide
  source 1..20: mol_type = other RNA
taagttctgtccaagcccgg

SEQ ID NO: 377 - RNA, 20 nt, synthetic construct
  misc_feature 1..20: note = Description of Artificial Sequence: Synthetic oligonucleotide
  source 1..20: mol_type = other RNA
gtaagttctgtccaagcccg

SEQ ID NO: 378 - RNA, 20 nt, synthetic construct
  misc_feature 1..20: note = Description of Artificial Sequence: Synthetic oligonucleotide
  source 1..20: mol_type = other RNA
ggtaagttctgtccaagccc

SEQ ID NO: 379 - RNA, 20 nt, synthetic construct
  misc_feature 1..20: note = Description of Artificial Sequence: Synthetic oligonucleotide
  source 1..20: mol_type = other RNA
cagtcggtaagttctgtcca

SEQ ID NO: 380 - RNA, 20 nt, synthetic construct
  misc_feature 1..20: note = Description of Artificial Sequence: Synthetic oligonucleotide
  source 1..20: mol_type = other RNA
ccagtcggtaagttctgtcc

SEQ ID NO: 381 - RNA, 20 nt, synthetic construct
  misc_feature 1..20: note = Description of Artificial Sequence: Synthetic oligonucleotide
  source 1..20: mol_type = other RNA
ccaccatcaccctctgtgat

SEQ ID NO: 382 - RNA, 20 nt, synthetic construct
  misc_feature 1..20: note = Description of Artificial Sequence: Synthetic oligonucleotide
  source 1..20: mol_type = other RNA
cccaccatcaccctctgtga

SEQ ID NO: 383 - RNA, 20 nt, synthetic construct
  misc_feature 1..20: note = Description of Artificial Sequence: Synthetic oligonucleotide
  source 1..20: mol_type = other RNA
cacccaccatcaccctctgt

SEQ ID NO: 384 - RNA, 20 nt, synthetic construct
  misc_feature 1..20: note = Description of Artificial Sequence: Synthetic oligonucleotide
  source 1..20: mol_type = other RNA
tcacccaccatcaccctctg

SEQ ID NO: 385 - RNA, 20 nt, synthetic construct
  misc_feature 1..20: note = Description of Artificial Sequence: Synthetic oligonucleotide
  source 1..20: mol_type = other RNA
gtcacccaccatcaccctct

SEQ ID NO: 386 - RNA, 20 nt, synthetic construct
  misc_feature 1..20: note = Description of Artificial Sequence: Synthetic oligonucleotide
  source 1..20: mol_type = other RNA
ggtcacccaccatcaccctc

SEQ ID NO: 387 - RNA, 20 nt, synthetic construct
  misc_feature 1..20: note = Description of Artificial Sequence: Synthetic oligonucleotide
  source 1..20: mol_type = other RNA
tcaagcagagaaagccagtc

SEQ ID NO: 388 - RNA, 20 nt, synthetic construct
  misc_feature 1..20: note = Description of Artificial Sequence: Synthetic oligonucleotide
  source 1..20: mol_type = other RNA
ttgatcaagcagagaaagcc

SEQ ID NO: 389 - RNA, 25 nt, synthetic construct
  misc_feature 1..25: note = Description of Artificial Sequence: Synthetic oligonucleotide
  source 1..25: mol_type = other RNA
caaagaagatggcatttctagtttg

SEQ ID NO: 390 - RNA, 20 nt, synthetic construct
  misc_feature 1..20: note = Description of Artificial Sequence: Synthetic oligonucleotide
  source 1..20: mol_type = other RNA
gcaaagaagatggcatttct

SEQ ID NO: 391 - RNA, 20 nt, synthetic construct
  misc_feature 1..20: note = Description of Artificial Sequence: Synthetic oligonucleotide
  source 1..20: mol_type = other RNA
gcaaagaagatggcatttct

SEQ ID NO: 392 - RNA, 20 nt, synthetic construct
  misc_feature 1..20: note = Description of Artificial Sequence: Synthetic oligonucleotide
  source 1..20: mol_type = other RNA
tcaaggaagatggcatttct

SEQ ID NO: 393 - RNA, 20 nt, synthetic construct
  misc_feature 1..20: note = Description of Artificial Sequence: Synthetic oligonucleotide
  source 1..20: mol_type = other RNA
tcaaggaagatggcatttct

SEQ ID NO: 394 - RNA, 20 nt, synthetic construct
  misc_feature 1..20: note = Description of Artificial Sequence: Synthetic oligonucleotide
  source 1..20: mol_type = other RNA
tcaaggaagatggcatttct

SEQ ID NO: 395 - RNA, 20 nt, synthetic construct
  misc_feature 1..20: note = Description of Artificial Sequence: Synthetic oligonucleotide
  source 1..20: mol_type = other RNA
tcaaggaagatggcatttct

SEQ ID NO: 396 - RNA, 20 nt, synthetic construct
  misc_feature 1..20: note = Description of Artificial Sequence: Synthetic oligonucleotide
  source 1..20: mol_type = other RNA
tcaaggaagatggcatttct

SEQ ID NO: 397 - RNA, 20 nt, synthetic construct
  misc_feature 1..20: note = Description of Artificial Sequence: Synthetic oligonucleotide
  source 1..20: mol_type = other RNA
tcaaggaagatggcatttct

SEQ ID NO: 398 - RNA, 20 nt, synthetic construct
  misc_feature 1..20: note = Description of Artificial Sequence: Synthetic oligonucleotide
  source 1..20: mol_type = other RNA
tcaaggaagatggcatttct

SEQ ID NO: 399 - RNA, 20 nt, synthetic construct
  misc_feature 1..20: note = Description of Artificial Sequence: Synthetic oligonucleotide
  source 1..20: mol_type = other RNA
tcaaggaagatggcatttct

SEQ ID NO: 400 - RNA, 20 nt, synthetic construct
  misc_feature 1..20: note = Description of Artificial Sequence: Synthetic oligonucleotide
  source 1..20: mol_type = other RNA
tcaaggaagatggcatttct

SEQ ID NO: 401 - RNA, 20 nt, synthetic construct
  misc_feature 1..20: note = Description of Artificial Sequence: Synthetic oligonucleotide
  source 1..20: mol_type = other RNA
tcaaggaagatggcatttct

SEQ ID NO: 402 - RNA, 20 nt, synthetic construct
  misc_feature 1..20: note = Description of Artificial Sequence: Synthetic oligonucleotide
  source 1..20: mol_type = other RNA
tcaaggaagatggcatttct

SEQ ID NO: 403 - RNA, 20 nt, synthetic construct
  misc_feature 1..20: note = Description of Artificial Sequence: Synthetic oligonucleotide
  source 1..20: mol_type = other RNA
tcaaggaagatggcatttct

SEQ ID NO: 404 - RNA, 20 nt, synthetic construct
  misc_feature 1..20: note = Description of Artificial Sequence: Synthetic oligonucleotide
  source 1..20: mol_type = other RNA
tcaaggaagatggcatttct

SEQ ID NO: 405 - RNA, 20 nt, synthetic construct
  misc_feature 1..20: note = Description of Artificial Sequence: Synthetic oligonucleotide
  source 1..20: mol_type = other RNA
tcaaggaagatggcatttct

SEQ ID NO: 406 - RNA, 20 nt, synthetic construct
  misc_feature 1..20: note = Description of Artificial Sequence: Synthetic oligonucleotide
  source 1..20: mol_type = other RNA
tcaaggaagatggcatttct

SEQ ID NO: 407 - RNA, 20 nt, synthetic construct
  misc_feature 1..20: note = Description of Artificial Sequence: Synthetic oligonucleotide
  source 1..20: mol_type = other RNA
tcaaggaagatggcatttct

SEQ ID NO: 408 - RNA, 20 nt, synthetic construct
  misc_feature 1..20: note = Description of Artificial Sequence: Synthetic oligonucleotide
  source 1..20: mol_type = other RNA
tcaaggaagatggcatttct

SEQ ID NO: 409 - RNA, 20 nt, synthetic construct
  misc_feature 1..20: note = Description of Artificial Sequence: Synthetic oligonucleotide
  source 1..20: mol_type = other RNA
tcaaggaagatggcatttct

SEQ ID NO: 410 - RNA, 20 nt, synthetic construct
  misc_feature 1..20: note = Description of Artificial Sequence: Synthetic oligonucleotide
  source 1..20: mol_type = other RNA
tcaaggaagatggcatttct

SEQ ID NO: 411 - RNA, 20 nt, synthetic construct
  misc_feature 1..20: note = Description of Artificial Sequence: Synthetic oligonucleotide
  source 1..20: mol_type = other RNA
tcaaggaagatggcatttct

SEQ ID NO: 412 - RNA, 20 nt, synthetic construct
  misc_feature 1..20: note = Description of Artificial Sequence: Synthetic oligonucleotide
  source 1..20: mol_type = other RNA
tcaaggaagatggcatttct

SEQ ID NO: 413 - RNA, 20 nt, synthetic construct
  misc_feature 1..20: note = Description of Artificial Sequence: Synthetic oligonucleotide
  source 1..20: mol_type = other RNA
tcaaggaagatggcatttct

SEQ ID NO: 414 - RNA, 20 nt, synthetic construct
  misc_feature 1..20: note = Description of Artificial Sequence: Synthetic oligonucleotide
  source 1..20: mol_type = other RNA
tcaaggaagatggcatttct

SEQ ID NO: 415 - RNA, 20 nt, synthetic construct
  misc_feature 1..20: note = Description of Artificial Sequence: Synthetic oligonucleotide
  source 1..20: mol_type = other RNA
tcaaggaagatggcatttct

SEQ ID NO: 416 - RNA, 20 nt, synthetic construct
  misc_feature 1..20: note = Description of Artificial Sequence: Synthetic oligonucleotide
  source 1..20: mol_type = other RNA
tcaaggaagatggcatttct

SEQ ID NO: 417 - RNA, 20 nt, synthetic construct
  misc_feature 1..20: note = Description of Artificial Sequence: Synthetic oligonucleotide
  source 1..20: mol_type = other RNA
tcaaggaagatggcatttct

SEQ ID NO: 418 - RNA, 20 nt, synthetic construct
  misc_feature 1..20: note = Description of Artificial Sequence: Synthetic oligonucleotide
  source 1..20: mol_type = other RNA
tcaaggaagatggcatttct

SEQ ID NO: 419 - RNA, 20 nt, synthetic construct
  misc_feature 1..20: note = Description of Artificial Sequence: Synthetic oligonucleotide
  source 1..20: mol_type = other RNA
tcaaggaagatggcatttct

SEQ ID NO: 420 - RNA, 20 nt, synthetic construct
  misc_feature 1..20: note = Description of Artificial Sequence: Synthetic oligonucleotide
  source 1..20: mol_type = other RNA
tcaaggaagatggcatttct

SEQ ID NO: 421 - RNA, 20 nt, synthetic construct
  misc_feature 1..20: note = Description of Artificial Sequence: Synthetic oligonucleotide
  source 1..20: mol_type = other RNA
ggccaaacctcggcttacct

SEQ ID NO: 422 - RNA, 20 nt, synthetic construct
  misc_feature 1..20: note = Description of Artificial Sequence: Synthetic oligonucleotide
  source 1..20: mol_type = other RNA
ggccaaacctcggcttacct

SEQ ID NO: 423 - RNA, 20 nt, synthetic construct
  misc_feature 1..20: note = Description of Artificial Sequence: Synthetic oligonucleotide
  source 1..20: mol_type = other RNA
ggccaaacctcggcttacct

SEQ ID NO: 424 - RNA, 20 nt, synthetic construct
  misc_feature 1..20: note = Description of Artificial Sequence: Synthetic oligonucleotide
  source 1..20: mol_type = other RNA
ggccaaacctcggcttacct

SEQ ID NO: 425 - RNA, 20 nt, synthetic construct
  misc_feature 1..20: note = Description of Artificial Sequence: Synthetic oligonucleotide
  source 1..20: mol_type = other RNA
ggccaaacctcggcttacct

SEQ ID NO: 426 - RNA, 20 nt, synthetic construct
  misc_feature 1..20: note = Description of Artificial Sequence: Synthetic oligonucleotide
  source 1..20: mol_type = other RNA
ggccaaacctcggcttacct

SEQ ID NO: 427 - RNA, 20 nt, synthetic construct
  misc_feature 1..20: note = Description of Artificial Sequence: Synthetic oligonucleotide
  source 1..20: mol_type = other RNA
ggccaaacctcggcttacct

SEQ ID NO: 428 - RNA, 20 nt, synthetic construct
  misc_feature 1..20: note = Description of Artificial Sequence: Synthetic oligonucleotide
  source 1..20: mol_type = other RNA
ggccaaacctcggcttacct

SEQ ID NO: 429 - RNA, 20 nt, synthetic construct
  misc_feature 1..20: note = Description of Artificial Sequence: Synthetic oligonucleotide
  source 1..20: mol_type = other RNA
tcaaggaagatggcatttct

SEQ ID NO: 430 - RNA, 20 nt, synthetic construct
  misc_feature 1..20: note = Description of Artificial Sequence: Synthetic oligonucleotide
  source 1..20: mol_type = other RNA
tcaaggaagatggcatttct

SEQ ID NO: 431 - RNA, 20 nt, synthetic construct
  misc_feature 1..20: note = Description of Artificial Sequence: Synthetic oligonucleotide
  source 1..20: mol_type = other RNA
tcaaggaagatggcatttct

SEQ ID NO: 432 - RNA, 20 nt, synthetic construct
  misc_feature 1..20: note = Description of Artificial Sequence: Synthetic oligonucleotide
  source 1..20: mol_type = other RNA
tcaaggaagatggcatttct

SEQ ID NO: 433 - RNA, 20 nt, synthetic construct
  misc_feature 1..20: note = Description of Artificial Sequence: Synthetic oligonucleotide
  source 1..20: mol_type = other RNA
tcaaggaagatggcatttct

SEQ ID NO: 434 - RNA, 20 nt, synthetic construct
  misc_feature 1..20: note = Description of Artificial Sequence: Synthetic oligonucleotide
  source 1..20: mol_type = other RNA
tcaaggaagatggcatttct

SEQ ID NO: 435 - RNA, 20 nt, synthetic construct
  misc_feature 1..20: note = Description of Artificial Sequence: Synthetic oligonucleotide
  source 1..20: mol_type = other RNA
tcaaggaagatggcatttct

SEQ ID NO: 436 - RNA, 20 nt, synthetic construct
  misc_feature 1..20: note = Description of Artificial Sequence: Synthetic oligonucleotide
  source 1..20: mol_type = other RNA
tcaaggaagatggcatttct

SEQ ID NO: 437 - DNA, 20 bp, synthetic construct
  misc_feature 1..20: note = Description of Artificial Sequence: Synthetic oligonucleotide
  source 1..20: mol_type = other DNA
ggccaaacctcggcttacct

SEQ ID NO: 438 - RNA, 20 nt, synthetic construct
  misc_feature 1..20: note = Description of Artificial Sequence: Synthetic oligonucleotide
  source 1..20: mol_type = other RNA
ggccaaacctcggcttacct

SEQ ID NO: 439 - DNA, 20 bp, synthetic construct
  misc_feature 1..20: note = Description of Artificial Sequence: Synthetic oligonucleotide
  source 1..20: mol_type = other DNA
ggccaaacctcggcttacct

SEQ ID NO: 440 - DNA, 20 bp, synthetic construct
  misc_feature 1..20: note = Description of Artificial Sequence: Synthetic oligonucleotide
  source 1..20: mol_type = other DNA
ggccaaacctcggcttacct

SEQ ID NO: 441 - RNA, 20 nt, synthetic construct
  modified_base 15..16: mod_base = OTHER; note = thymine
  modified_base 20: mod_base = OTHER; note = thymine
  misc_feature 1..20: note = Description of Combined DNA/RNA Molecule: Synthetic oligonucleotide
  source 1..20: mol_type = other RNA
ggccaaacctcggcttacct

SEQ ID NO: 442 - RNA, 20 nt, synthetic construct
  modified_base 10: mod_base = OTHER; note = thymine
  modified_base 15..16: mod_base = OTHER; note = thymine
  misc_feature 1..20: note = Description of Combined DNA/RNA Molecule: Synthetic oligonucleotide
  source 1..20: mol_type = other RNA
ggccaaacctcggcttacct

SEQ ID NO: 443 - RNA, 20 nt, synthetic construct
  modified_base 15: mod_base = OTHER; note = thymine
  misc_feature 1..20: note = Description of Combined DNA/RNA Molecule: Synthetic oligonucleotide
  source 1..20: mol_type = other RNA
ggccaaacctcggcttacct

SEQ ID NO: 444 - RNA, 20 nt, synthetic construct
  modified_base 10: mod_base = OTHER; note = thymine
  modified_base 16: mod_base = OTHER; note = thymine
  misc_feature 1..20: note = Description of Combined DNA/RNA Molecule: Synthetic oligonucleotide
  source 1..20: mol_type = other RNA
ggccaaacctcggcttacct

SEQ ID NO: 445 - RNA, 20 nt, synthetic construct
  modified_base 10: mod_base = OTHER; note = thymine
  modified_base 15: mod_base = OTHER; note = thymine
  misc_feature 1..20: note = Description of Combined DNA/RNA Molecule: Synthetic oligonucleotide
  source 1..20: mol_type = other RNA
ggccaaacctcggcttacct

SEQ ID NO: 446 - RNA, 20 nt, synthetic construct
  misc_feature 1..20: note = Description of Artificial Sequence: Synthetic oligonucleotide
  source 1..20: mol_type = other RNA
ggccaaacctcggcttacct

SEQ ID NO: 447 - RNA, 20 nt, synthetic construct
  modified_base 10: mod_base = OTHER; note = thymine
  modified_base 16: mod_base = OTHER; note = thymine
  misc_feature 1..20: note = Description of Combined DNA/RNA Molecule: Synthetic oligonucleotide
  source 1..20: mol_type = other RNA
ggccaaacctcggcttacct

SEQ ID NO: 448 - RNA, 20 nt, synthetic construct
  modified_base 10: mod_base = OTHER; note = thymine
  modified_base 15: mod_base = OTHER; note = thymine
  misc_feature 1..20: note = Description of Combined DNA/RNA Molecule: Synthetic oligonucleotide
  source 1..20: mol_type = other RNA
ggccaaacctcggcttacct

SEQ ID NO: 449 - RNA, 20 nt, synthetic construct
  modified_base 15..16: mod_base = OTHER; note = thymine
  misc_feature 1..20: note = Description of Combined DNA/RNA Molecule: Synthetic oligonucleotide
  source 1..20: mol_type = other RNA
ggccaaacctcggcttacct

SEQ ID NO: 450 - RNA, 20 nt, synthetic construct
  modified_base 15..16: mod_base = OTHER; note = thymine
  modified_base 20: mod_base = OTHER; note = thymine
  misc_feature 1..20: note = Description of Combined DNA/RNA Molecule: Synthetic oligonucleotide
  source 1..20: mol_type = other RNA
ggccaaacctcggcttacct

SEQ ID NO: 451 - RNA, 20 nt, synthetic construct
  modified_base 10: mod_base = OTHER; note = thymine
  modified_base 15..16: mod_base = OTHER; note = thymine
  misc_feature 1..20: note = Description of Combined DNA/RNA Molecule: Synthetic oligonucleotide
  source 1..20: mol_type = other RNA
ggccaaacctcggcttacct

SEQ ID NO: 452 - RNA, 20 nt, synthetic construct
  modified_base 15: mod_base = OTHER; note = thymine
  misc_feature 1..20: note = Description of Combined DNA/RNA Molecule: Synthetic oligonucleotide
  source 1..20: mol_type = other RNA
ggccaaacctcggcttacct

SEQ ID NO: 453 - RNA, 20 nt, synthetic construct
  modified_base 10: mod_base = OTHER; note = thymine
  modified_base 16: mod_base = OTHER; note = thymine
  misc_feature 1..20: note = Description of Combined DNA/RNA Molecule: Synthetic oligonucleotide
  source 1..20: mol_type = other RNA
ggccaaacctcggcttacct

SEQ ID NO: 454 - RNA, 20 nt, synthetic construct
  modified_base 10: mod_base = OTHER; note = thymine
  modified_base 15: mod_base = OTHER; note = thymine
  misc_feature 1..20: note = Description of Combined DNA/RNA Molecule: Synthetic oligonucleotide
  source 1..20: mol_type = other RNA
ggccaaacctcggcttacct

SEQ ID NO: 455 - RNA, 20 nt, synthetic construct
  misc_feature 1..20: note = Description of Artificial Sequence: Synthetic oligonucleotide
  source 1..20: mol_type = other RNA
ggccaaacctcggcttacct

SEQ ID NO: 456 - RNA, 20 nt, synthetic construct
  modified_base 10: mod_base = OTHER; note = thymine
  modified_base 16: mod_base = OTHER; note = thymine
  misc_feature 1..20: note = Description of Combined DNA/RNA Molecule: Synthetic oligonucleotide
  source 1..20: mol_type = other RNA
ggccaaacctcggcttacct

SEQ ID NO: 457 - RNA, 20 nt, synthetic construct
  modified_base 10: mod_base = OTHER; note = thymine
  modified_base 15: mod_base = OTHER; note = thymine
  misc_feature 1..20: note = Description of Combined DNA/RNA Molecule: Synthetic oligonucleotide
  source 1..20: mol_type = other RNA
ggccaaacctcggcttacct

SEQ ID NO: 458 - RNA, 20 nt, synthetic construct
  modified_base 15..16: mod_base = OTHER; note = thymine
  misc_feature 1..20: note = Description of Combined DNA/RNA Molecule: Synthetic oligonucleotide
  source 1..20: mol_type = other RNA
ggccaaacctcggcttacct

SEQ ID NO: 459 - RNA, 20 nt, synthetic construct
  modified_base 16: mod_base = OTHER; note = thymine
  misc_feature 1..20: note = Description of Combined DNA/RNA Molecule: Synthetic oligonucleotide
  source 1..20: mol_type = other RNA
ggccaaacctcggcttacct

SEQ ID NO: 460 - RNA, 20 nt, synthetic construct
  misc_feature 1..20: note = Description of Artificial Sequence: Synthetic oligonucleotide
  source 1..20: mol_type = other RNA
ggccaaacctcggcttacct

SEQ ID NO: 461 - RNA, 20 nt, synthetic construct
  misc_feature 1..20: note = Description of Artificial Sequence: Synthetic oligonucleotide
  source 1..20: mol_type = other RNA
ggccaaacctcggcttacct

SEQ ID NO: 462 - RNA, 20 nt, synthetic construct
  misc_feature 1..20: note = Description of Artificial Sequence: Synthetic oligonucleotide
  source 1..20: mol_type = other RNA
ggccaaacctcggcttacct

SEQ ID NO: 463 - RNA, 20 nt, synthetic construct
  misc_feature 1..20: note = Description of Artificial Sequence: Synthetic oligonucleotide
  source 1..20: mol_type = other RNA
ggccaaacctcggcttacct

SEQ ID NO: 464 - RNA, 20 nt, synthetic construct
  misc_feature 1..20: note = Description of Artificial Sequence: Synthetic oligonucleotide
  source 1..20: mol_type = other RNA
ggccaaacctcggcttacct

SEQ ID NO: 465 - RNA, 20 nt, synthetic construct
  misc_feature 1..20: note = Description of Artificial Sequence: Synthetic oligonucleotide
  source 1..20: mol_type = other RNA
ggccaaacctcggcttacct

SEQ ID NO: 466 - RNA, 20 nt, synthetic construct
  misc_feature 1..20: note = Description of Artificial Sequence: Synthetic oligonucleotide
  source 1..20: mol_type = other RNA
ggccaaacctcggcttacct

SEQ ID NO: 467 - RNA, 20 nt, synthetic construct
  misc_feature 1..20: note = Description of Artificial Sequence: Synthetic oligonucleotide
  source 1..20: mol_type = other RNA
ggccaaacctcggcttacct

SEQ ID NO: 468 - RNA, 20 nt, synthetic construct
  misc_feature 1..20: note = Description of Artificial Sequence: Synthetic oligonucleotide
  source 1..20: mol_type = other RNA
ggccaaacctcggcttacct

SEQ ID NO: 469 - RNA, 20 nt, synthetic construct
  misc_feature 1..20: note = Description of Artificial Sequence: Synthetic oligonucleotide
  source 1..20: mol_type = other RNA
ggccaaacctcggcttacct

SEQ ID NO: 470 - RNA, 20 nt, synthetic construct
  misc_feature 1..20: note = Description of Artificial Sequence: Synthetic oligonucleotide
  source 1..20: mol_type = other RNA
ggccaaacctcggcttacct

SEQ ID NO: 471 - RNA, 25 nt, synthetic construct
  misc_feature 1..25: note = Description of Artificial Sequence: Synthetic oligonucleotide
  source 1..25: mol_type = other RNA
ggccaaacctcggcttacctgaaat

SEQ ID NO: 472 - RNA, 20 nt, synthetic construct
  modified_base 16: mod_base = OTHER; note = thymine
  misc_feature 1..20: note = Description of Combined DNA/RNA Molecule: Synthetic oligonucleotide
  source 1..20: mol_type = other RNA
ggccaaacctcggcttacct

SEQ ID NO: 473 - DNA, 20 bp, synthetic construct
  misc_feature 1..20: note = Description of Artificial Sequence: Synthetic oligonucleotide
  source 1..20: mol_type = other DNA
tcaaggaagatggcatttct

SEQ ID NO: 474 - RNA, 20 nt, synthetic construct
  misc_feature 1..20: note = Description of Artificial Sequence: Synthetic oligonucleotide
  source 1..20: mol_type = other RNA
tcaaggaagatggcatttct

SEQ ID NO: 475 - DNA, 20 bp, synthetic construct
  misc_feature 1..20: note = Description of Artificial Sequence: Synthetic oligonucleotide
  source 1..20: mol_type = other DNA
tcaaggaagatggcatttct

SEQ ID NO: 476 - DNA, 20 bp, synthetic construct
  misc_feature 1..20: note = Description of Artificial Sequence: Synthetic oligonucleotide
  source 1..20: mol_type = other DNA
tcaaggaagatggcatttct

SEQ ID NO: 477 - RNA, 20 nt, synthetic construct
  modified_base 1: mod_base = OTHER; note = thymine
  modified_base 16..18: mod_base = OTHER; note = thymine
  modified_base 20: mod_base = OTHER; note = thymine
  misc_feature 1..20: note = Description of Combined DNA/RNA Molecule: Synthetic oligonucleotide
  source 1..20: mol_type = other RNA
tcaaggaagatggcatttct

SEQ ID NO: 478 - RNA, 20 nt, synthetic construct
  modified_base 11: mod_base = OTHER; note = thymine
  modified_base 16: mod_base = OTHER; note = thymine
  misc_feature 1..20: note = Description of Combined DNA/RNA Molecule: Synthetic oligonucleotide
  source 1..20: mol_type = other RNA
tcaaggaagatggcatttct

SEQ ID NO: 479 - RNA, 20 nt, synthetic construct
  modified_base 1: mod_base = OTHER; note = thymine
  modified_base 11: mod_base = OTHER; note = thymine
  modified_base 17: mod_base = OTHER; note = thymine
  misc_feature 1..20: note = Description of Combined DNA/RNA Molecule: Synthetic oligonucleotide
  source 1..20: mol_type = other RNA
tcaaggaagatggcatttct

SEQ ID NO: 480 - RNA, 20 nt, synthetic construct
  modified_base 16: mod_base = OTHER; note = thymine
  modified_base 18: mod_base = OTHER; note = thymine
  misc_feature 1..20: note = Description of Combined DNA/RNA Molecule: Synthetic oligonucleotide
  source 1..20: mol_type = other RNA
tcaaggaagatggcatttct

SEQ ID NO: 481 - RNA, 20 nt, synthetic construct
  modified_base 1: mod_base = OTHER; note = thymine
  modified_base 11: mod_base = OTHER; note = thymine
  modified_base 18: mod_base = OTHER; note = thymine
  misc_feature 1..20: note = Description of Combined DNA/RNA Molecule: Synthetic oligonucleotide
  source 1..20: mol_type = other RNA
tcaaggaagatggcatttct

SEQ ID NO: 482 - RNA, 20 nt, synthetic construct
  modified_base 1: mod_base = OTHER; note = thymine
  modified_base 17..18: mod_base = OTHER; note = thymine
  misc_feature 1..20: note = Description of Combined DNA/RNA Molecule: Synthetic oligonucleotide
  source 1..20: mol_type = other RNA
tcaaggaagatggcatttct

SEQ ID NO: 483 - RNA, 20 nt, synthetic construct
  modified_base 1: mod_base = OTHER; note = thymine
  modified_base 11: mod_base = OTHER; note = thymine
  modified_base 16..18: mod_base = OTHER; note = thymine
  misc_feature 1..20: note = Description of Combined DNA/RNA Molecule: Synthetic oligonucleotide
  source 1..20: mol_type = other RNA
tcaaggaagatggcatttct

SEQ ID NO: 484 - RNA, 20 nt, synthetic construct
  modified_base 1: mod_base = OTHER; note = thymine
  modified_base 11: mod_base = OTHER; note = thymine
  modified_base 17..18: mod_base = OTHER; note = thymine
  misc_feature 1..20: note = Description of Combined DNA/RNA Molecule: Synthetic oligonucleotide
  source 1..20: mol_type = other RNA
tcaaggaagatggcatttct

SEQ ID NO: 485 - RNA, 20 nt, synthetic construct
  modified_base 16..18: mod_base = OTHER; note = thymine
  misc_feature 1..20: note = Description of Combined DNA/RNA Molecule: Synthetic oligonucleotide
  source 1..20: mol_type = other RNA
tcaaggaagatggcatttct

SEQ ID NO: 486 - RNA, 20 nt, synthetic construct
  modified_base 1: mod_base = OTHER; note = thymine
  modified_base 11: mod_base = OTHER; note = thymine
  modified_base 16..18: mod_base = OTHER; note = thymine
  misc_feature 1..20: note = Description of Combined DNA/RNA Molecule: Synthetic oligonucleotide
  source 1..20: mol_type = other RNA
tcaaggaagatggcatttct

SEQ ID NO: 487 - RNA, 20 nt, synthetic construct
  modified_base 1: mod_base = OTHER; note = thymine
  modified_base 16..18: mod_base = OTHER; note = thymine
  modified_base 20: mod_base = OTHER; note = thymine
  misc_feature 1..20: note = Description of Combined DNA/RNA Molecule: Synthetic oligonucleotide
  source 1..20: mol_type = other RNA
tcaaggaagatggcatttct

SEQ ID NO: 488 - RNA, 20 nt, synthetic construct
  modified_base 11: mod_base = OTHER; note = thymine
  modified_base 16: mod_base = OTHER; note = thymine
  misc_feature 1..20: note = Description of Combined DNA/RNA Molecule: Synthetic oligonucleotide
  source 1..20: mol_type = other RNA
tcaaggaagatggcatttct

SEQ ID NO: 489 - RNA, 20 nt, synthetic construct
  modified_base 1: mod_base = OTHER; note = thymine
  modified_base 11: mod_base = OTHER; note = thymine
  modified_base 17: mod_base = OTHER; note = thymine
  misc_feature 1..20: note = Description of Combined DNA/RNA Molecule: Synthetic oligonucleotide
  source 1..20: mol_type = other RNA
tcaaggaagatggcatttct

SEQ ID NO: 490 - RNA, 20 nt, synthetic construct
  modified_base 16: mod_base = OTHER; note = thymine
  modified_base 18: mod_base = OTHER; note = thymine
  misc_feature 1..20: note = Description of Combined DNA/RNA Molecule: Synthetic oligonucleotide
  source 1..20: mol_type = other RNA
tcaaggaagatggcatttct

SEQ ID NO: 491 - RNA, 20 nt, synthetic construct
  modified_base 1: mod_base = OTHER; note = thymine
  modified_base 11: mod_base = OTHER; note = thymine
  modified_base 18: mod_base = OTHER; note = thymine
  misc_feature 1..20: note = Description of Combined DNA/RNA Molecule: Synthetic oligonucleotide
  source 1..20: mol_type = other RNA
tcaaggaagatggcatttct

SEQ ID NO: 492 - RNA, 20 nt, synthetic construct
  modified_base 1: mod_base = OTHER; note = thymine
  modified_base 17..18: mod_base = OTHER; note = thymine
  misc_feature 1..20: note = Description of Combined DNA/RNA Molecule: Synthetic oligonucleotide
  source 1..20: mol_type = other RNA
tcaaggaagatggcatttct

SEQ ID NO: 493 - RNA, 20 nt, synthetic construct
  modified_base 1: mod_base = OTHER; note = thymine
  modified_base 11: mod_base = OTHER; note = thymine
  modified_base 16..18: mod_base = OTHER; note = thymine
  misc_feature 1..20: note = Description of Combined DNA/RNA Molecule: Synthetic oligonucleotide
  source 1..20: mol_type = other RNA
tcaaggaagatggcatttct

SEQ ID NO: 494 - RNA, 20 nt, synthetic construct
  modified_base 1: mod_base = OTHER; note = thymine
  modified_base 11: mod_base = OTHER; note = thymine
  modified_base 17..18: mod_base = OTHER; note = thymine
  misc_feature 1..20: note = Description of Combined DNA/RNA Molecule: Synthetic oligonucleotide
  source 1..20: mol_type = other RNA
tcaaggaagatggcatttct

SEQ ID NO: 495 - RNA, 20 nt, synthetic construct
  modified_base 16..18: mod_base = OTHER; note = thymine
  misc_feature 1..20: note = Description of Combined DNA/RNA Molecule: Synthetic oligonucleotide
  source 1..20: mol_type = other RNA
tcaaggaagatggcatttct

SEQ ID NO: 496 - RNA, 20 nt, synthetic construct
  modified_base 1: mod_base = OTHER; note = thymine
  modified_base 11: mod_base = OTHER; note = thymine
  modified_base 16..18: mod_base = OTHER; note = thymine
  misc_feature 1..20: note = Description of Combined DNA/RNA Molecule: Synthetic oligonucleotide
  source 1..20: mol_type = other RNA
tcaaggaagatggcatttct

SEQ ID NO: 497 - RNA, 20 nt, synthetic construct
  misc_feature 1..20: note = Description of Artificial Sequence: Synthetic oligonucleotide
  source 1..20: mol_type = other RNA
tcaaggaagatggcatttct

SEQ ID NO: 498 - RNA, 20 nt, synthetic construct
  misc_feature 1..20: note = Description of Artificial Sequence: Synthetic oligonucleotide
  source 1..20: mol_type = other RNA
tcaaggaagatggcatttct

SEQ ID NO: 499 - RNA, 20 nt, synthetic construct
  misc_feature 1..20: note = Description of Artificial Sequence: Synthetic oligonucleotide
  source 1..20: mol_type = other RNA
tcaaggaagatggcatttct

SEQ ID NO: 500 - RNA, 20 nt, synthetic construct
  misc_feature 1..20: note = Description of Artificial Sequence: Synthetic oligonucleotide
  source 1..20: mol_type = other RNA
tcaaggaagatggcatttct

SEQ ID NO: 501 - RNA, 20 nt, synthetic construct
  misc_feature 1..20: note = Description of Artificial Sequence: Synthetic oligonucleotide
  source 1..20: mol_type = other RNA
tcaaggaagatggcatttct

SEQ ID NO: 502 - RNA, 20 nt, synthetic construct
  misc_feature 1..20: note = Description of Artificial Sequence: Synthetic oligonucleotide
  source 1..20: mol_type = other RNA
tcaaggaagatggcatttct

SEQ ID NO: 503 - RNA, 20 nt, synthetic construct
  misc_feature 1..20: note = Description of Artificial Sequence: Synthetic oligonucleotide
  source 1..20: mol_type = other RNA
tcaaggaagatggcatttct

SEQ ID NO: 504 - RNA, 20 nt, synthetic construct
  misc_feature 1..20: note = Description of Artificial Sequence: Synthetic oligonucleotide
  source 1..20: mol_type = other RNA
tcaaggaagatggcatttct

SEQ ID NO: 505 - RNA, 20 nt, synthetic construct
  misc_feature 1..20: note = Description of Artificial Sequence: Synthetic oligonucleotide
  source 1..20: mol_type = other RNA
tcaaggaagatggcatttct

SEQ ID NO: 506 - RNA, 20 nt, synthetic construct
  misc_feature 1..20: note = Description of Artificial Sequence: Synthetic oligonucleotide
  source 1..20: mol_type = other RNA
tcaaggaagatggcatttct

SEQ ID NO: 507 - RNA, 20 nt, synthetic construct
  misc_feature 1..20: note = Description of Artificial Sequence: Synthetic oligonucleotide
  source 1..20: mol_type = other RNA
agaaatgccatcttccttga

SEQ ID NO: 508 - RNA, 20 nt, synthetic construct
  misc_feature 1..20: note = Description of Artificial Sequence: Synthetic oligonucleotide
  source 1..20: mol_type = other RNA
tcaaggaagatggcatttct

SEQ ID NO: 509 - RNA, 20 nt, synthetic construct
  misc_feature 1..20: note = Description of Artificial Sequence: Synthetic oligonucleotide
  source 1..20: mol_type = other RNA
tcaaggaagatggcatttct

SEQ ID NO: 510 - RNA, 20 nt, synthetic construct
  misc_feature 1..20: note = Description of Artificial Sequence: Synthetic oligonucleotide
  source 1..20: mol_type = other RNA
tcaaggaagatggcatttct

SEQ ID NO: 511 - RNA, 20 nt, synthetic construct
  misc_feature 1..20: note = Description of Artificial Sequence: Synthetic oligonucleotide
  source 1..20: mol_type = other RNA
tcaaggaagatggcatttct

SEQ ID NO: 512 - RNA, 20 nt, synthetic construct
  misc_feature 1..20: note = Description of Artificial Sequence: Synthetic oligonucleotide
  source 1..20: mol_type = other RNA
tcaaggaagatggcatttct

SEQ ID NO: 513 - RNA, 20 nt, synthetic construct
  misc_feature 1..20: note = Description of Artificial Sequence: Synthetic oligonucleotide
  source 1..20: mol_type = other RNA
tcaaggaagatggcatttct

SEQ ID NO: 514 - RNA, 20 nt, synthetic construct
  misc_feature 1..20: note = Description of Artificial Sequence: Synthetic oligonucleotide
  source 1..20: mol_type = other RNA
tcaaggaagatggcatttct

SEQ ID NO: 515 - RNA, 20 nt, synthetic construct
  misc_feature 1..20: note = Description of Artificial Sequence: Synthetic oligonucleotide
  source 1..20: mol_type = other RNA
tcaaggaagatggcatttct

SEQ ID NO: 516 - RNA, 20 nt, synthetic construct
  misc_feature 1..20: note = Description of Artificial Sequence: Synthetic oligonucleotide
  source 1..20: mol_type = other RNA
tcaaggaagatggcatttct

SEQ ID NO: 517 - RNA, 20 nt, synthetic construct
  misc_feature 1..20: note = Description of Artificial Sequence: Synthetic oligonucleotide
  source 1..20: mol_type = other RNA
tcaaggaagatggcatttct

SEQ ID NO: 518 - RNA, 20 nt, synthetic construct
  misc_feature 1..20: note = Description of Artificial Sequence: Synthetic oligonucleotide
  source 1..20: mol_type = other RNA
tcaaggaagatggcatttct

SEQ ID NO: 519 - RNA, 20 nt, synthetic construct
  misc_feature 1..20: note = Description of Artificial Sequence: Synthetic oligonucleotide
  source 1..20: mol_type = other RNA
tcaaggaagatggcatttct

SEQ ID NO: 520 - RNA, 20 nt, synthetic construct
  misc_feature 1..20: note = Description of Artificial Sequence: Synthetic oligonucleotide
  source 1..20: mol_type = other RNA
tcaaggaagatggcatttct

SEQ ID NO: 521 - RNA, 20 nt, synthetic construct
  misc_feature 1..20: note = Description of Artificial Sequence: Synthetic oligonucleotide
  source 1..20: mol_type = other RNA
tcaaggaagatggcatttct

SEQ ID NO: 522 - RNA, 20 nt, synthetic construct
  misc_feature 1..20: note = Description of Artificial Sequence: Synthetic oligonucleotide
  source 1..20: mol_type = other RNA
tcaaggaagatggcatttct

SEQ ID NO: 523 - RNA, 20 nt, synthetic construct
  misc_feature 1..20: note = Description of Artificial Sequence: Synthetic oligonucleotide
  source 1..20: mol_type = other RNA
tcaaggaagatggcatttct

SEQ ID NO: 524 - RNA, 20 nt, synthetic construct
  misc_feature 1..20: note = Description of Artificial Sequence: Synthetic oligonucleotide
  source 1..20: mol_type = other RNA
tcaaggaagatggcatttct

SEQ ID NO: 525 - RNA, 20 nt, synthetic construct
  misc_feature 1..20: note = Description of Artificial Sequence: Synthetic oligonucleotide
  source 1..20: mol_type = other RNA
tcaaggaagatggcatttct

SEQ ID NO: 526 - RNA, 20 nt, synthetic construct
  misc_feature 1..20: note = Description of Artificial Sequence: Synthetic oligonucleotide
  source 1..20: mol_type = other RNA
tcaaggaagatggcatttct

SEQ ID NO: 527 - RNA, 20 nt, synthetic construct
  misc_feature 1..20: note = Description of Artificial Sequence: Synthetic oligonucleotide
  source 1..20: mol_type = other RNA
tcaaggaagatggcatttct

SEQ ID NO: 528 - RNA, 20 nt, synthetic construct
  misc_feature 1..20: note = Description of Artificial Sequence: Synthetic oligonucleotide
  source 1..20: mol_type = other RNA
tcaaggaagatggcatttct

SEQ ID NO: 529 - RNA, 20 nt, synthetic construct
  misc_feature 1..20: note = Description of Artificial Sequence: Synthetic oligonucleotide
  source 1..20: mol_type = other RNA
tcaaggaagatggcatttct

SEQ ID NO: 530 - RNA, 20 nt, synthetic construct
  misc_feature 1..20: note = Description of Artificial Sequence: Synthetic oligonucleotide
  source 1..20: mol_type = other RNA
tcaaggaagatggcatttct

SEQ ID NO: 531 - RNA, 20 nt, synthetic construct
  misc_feature 1..20: note = Description of Artificial Sequence: Synthetic oligonucleotide
  source 1..20: mol_type = other RNA
tcaaggaagatggcatttct

SEQ ID NO: 532 - RNA, 20 nt, synthetic construct
  misc_feature 1..20: note = Description of Artificial Sequence: Synthetic oligonucleotide
  source 1..20: mol_type = other RNA
tcaaggaagatggcatttct

SEQ ID NO: 533 - RNA, 20 nt, synthetic construct
  misc_feature 1..20: note = Description of Artificial Sequence: Synthetic oligonucleotide
  source 1..20: mol_type = other RNA
tcaaggaagatggcatttct

SEQ ID NO: 534 - RNA, 20 nt, synthetic construct
  misc_feature 1..20: note = Description of Artificial Sequence: Synthetic oligonucleotide
  source 1..20: mol_type = other RNA
tcaaggaagatggcatttct

SEQ ID NO: 535 - RNA, 20 nt, synthetic construct
  misc_feature 1..20: note = Description of Artificial Sequence: Synthetic oligonucleotide
  source 1..20: mol_type = other RNA
tcaaggaagatggcatttct

SEQ ID NO: 536 - RNA, 20 nt, synthetic construct
  misc_feature 1..20: note = Description of Artificial Sequence: Synthetic oligonucleotide
  source 1..20: mol_type = other RNA
tcaaggaagatggcatttct

SEQ ID NO: 537 - RNA, 20 nt, synthetic construct
  misc_feature 1..20: note = Description of Artificial Sequence: Synthetic oligonucleotide
  source 1..20: mol_type = other RNA
tcaaggaagatggcatttct

SEQ ID NO: 538 - RNA, 20 nt, synthetic construct
  misc_feature 1..20: note = Description of Artificial Sequence: Synthetic oligonucleotide
  source 1..20: mol_type = other RNA
tcaaggaagatggcatttct

SEQ ID NO: 539 - RNA, 20 nt, synthetic construct
  misc_feature 1..20: note = Description of Artificial Sequence: Synthetic oligonucleotide
  source 1..20: mol_type = other RNA
tcaaggaagatggcatttct

SEQ ID NO: 540 - RNA, 20 nt, synthetic construct
  misc_feature 1..20: note = Description of Artificial Sequence: Synthetic oligonucleotide
  source 1..20: mol_type = other RNA
tcaaggaagatggcatttct

SEQ ID NO: 541 - RNA, 20 nt, synthetic construct
  misc_feature 1..20: note = Description of Artificial Sequence: Synthetic oligonucleotide
  source 1..20: mol_type = other RNA
tcaaggaagatggcatttct

SEQ ID NO: 542 - RNA, 20 nt, synthetic construct
  misc_feature 1..20: note = Description of Artificial Sequence: Synthetic oligonucleotide
  source 1..20: mol_type = other RNA
tcaaggaagatggcatttct

SEQ ID NO: 543 - RNA, 20 nt, synthetic construct
  misc_feature 1..20: note = Description of Artificial Sequence: Synthetic oligonucleotide
  source 1..20: mol_type = other RNA
tcaaggaagatggcatttct

SEQ ID NO: 544 - RNA, 20 nt, synthetic construct
  misc_feature 1..20: note = Description of Artificial Sequence: Synthetic oligonucleotide
  source 1..20: mol_type = other RNA
tcaaggaagatggcatttct

SEQ ID NO: 545 - RNA, 20 nt, synthetic construct
  misc_feature 1..20: note = Description of Artificial Sequence: Synthetic oligonucleotide
  source 1..20: mol_type = other RNA
tcaaggaagatggcatttct

SEQ ID NO: 546 - RNA, 20 nt, synthetic construct
  misc_feature 1..20: note = Description of Artificial Sequence: Synthetic oligonucleotide
  source 1..20: mol_type = other RNA
tcaaggaagatggcatttct

SEQ ID NO: 547 - RNA, 20 nt, synthetic construct
  misc_feature 1..20: note = Description of Artificial Sequence: Synthetic oligonucleotide
  source 1..20: mol_type = other RNA
tcaaggaagatggcatttct

SEQ ID NO: 548 - RNA, 20 nt, synthetic construct
  misc_feature 1..20: note = Description of Artificial Sequence: Synthetic oligonucleotide
  source 1..20: mol_type = other RNA
tcaaggaagatggcatttct

SEQ ID NO: 549 - RNA, 20 nt, synthetic construct
  misc_feature 1..20: note = Description of Artificial Sequence: Synthetic oligonucleotide
  source 1..20: mol_type = other RNA
tcaaggaagatggcatttct

SEQ ID NO: 550 - RNA, 20 nt, synthetic construct
  misc_feature 1..20: note = Description of Artificial Sequence: Synthetic oligonucleotide
  source 1..20: mol_type = other RNA
tcaaggaagatggcatttct

SEQ ID NO: 551 - RNA, 20 nt, synthetic construct
  misc_feature 1..20: note = Description of Artificial Sequence: Synthetic oligonucleotide
  source 1..20: mol_type = other RNA
tcaaggaagatggcatttct

SEQ ID NO: 552 - RNA, 20 nt, synthetic construct
  misc_feature 1..20: note = Description of Artificial Sequence: Synthetic oligonucleotide
  source 1..20: mol_type = other RNA
tcaaggaagatggcatttct

SEQ ID NO: 553 - RNA, 20 nt, synthetic construct
  misc_feature 1..20: note = Description of Artificial Sequence: Synthetic oligonucleotide
  source 1..20: mol_type = other RNA
tcaaggaagatggcatttct

SEQ ID NO: 554 - RNA, 20 nt, synthetic construct
  misc_feature 1..20: note = Description of Artificial Sequence: Synthetic oligonucleotide
  source 1..20: mol_type = other RNA
tcaaggaagatggcatttct

SEQ ID NO: 555 - RNA, 20 nt, synthetic construct
  misc_feature 1..20: note = Description of Artificial Sequence: Synthetic oligonucleotide
  source 1..20: mol_type = other RNA
tcaaggaagatggcatttct

SEQ ID NO: 556 - RNA, 20 nt, synthetic construct
  misc_feature 1..20: note = Description of Artificial Sequence: Synthetic oligonucleotide
  source 1..20: mol_type = other RNA
tcaaggaagatggcatttct

SEQ ID NO: 557 - RNA, 20 nt, synthetic construct
  misc_feature 1..20: note = Description of Artificial Sequence: Synthetic oligonucleotide
  source 1..20: mol_type = other RNA
tcaaggaagatggcatttct

SEQ ID NO: 558 - RNA, 20 nt, synthetic construct
  misc_feature 1..20: note = Description of Artificial Sequence: Synthetic oligonucleotide
  source 1..20: mol_type = other RNA
tcaaggaagatggcatttct

SEQ ID NO: 559 - RNA, 20 nt, synthetic construct
  misc_feature 1..20: note = Description of Artificial Sequence: Synthetic oligonucleotide
  source 1..20: mol_type = other RNA
tcaaggaagatggcatttct

SEQ ID NO: 560 - RNA, 20 nt, synthetic construct
  misc_feature 1..20: note = Description of Artificial Sequence: Synthetic oligonucleotide
  source 1..20: mol_type = other RNA
tcaaggaagatggcatttct

SEQ ID NO: 561 - RNA, 20 nt, synthetic construct
  misc_feature 1..20: note = Description of Artificial Sequence: Synthetic oligonucleotide
  source 1..20: mol_type = other RNA
tcaaggaagatggcatttct

SEQ ID NO: 562 - RNA, 20 nt, synthetic construct
  misc_feature 1..20: note = Description of Artificial Sequence: Synthetic oligonucleotide
  source 1..20: mol_type = other RNA
tcaaggaagatggcatttct

SEQ ID NO: 563 - RNA, 20 nt, synthetic construct
  misc_feature 1..20: note = Description of Artificial Sequence: Synthetic oligonucleotide
  source 1..20: mol_type = other RNA
tcaaggaagatggcatttct

SEQ ID NO: 564 - RNA, 20 nt, synthetic construct
  misc_feature 1..20: note = Description of Artificial Sequence: Synthetic oligonucleotide
  source 1..20: mol_type = other RNA
tcaaggaagatggcatttct

SEQ ID NO: 565 - RNA, 20 nt, synthetic construct
  misc_feature 1..20: note = Description of Artificial Sequence: Synthetic oligonucleotide
  source 1..20: mol_type = other RNA
tcaaggaagatggcatttct

SEQ ID NO: 566 - RNA, 20 nt, synthetic construct
  misc_feature 1..20: note = Description of Artificial Sequence: Synthetic oligonucleotide
  source 1..20: mol_type = other RNA
tcaaggaagatggcatttct

SEQ ID NO: 567 - RNA, 20 nt, synthetic construct
  misc_feature 1..20: note = Description of Artificial Sequence: Synthetic oligonucleotide
  source 1..20: mol_type = other RNA
tcaaggaagatggcatttct

SEQ ID NO: 568 - RNA, 20 nt, synthetic construct
  misc_feature 1..20: note = Description of Artificial Sequence: Synthetic oligonucleotide
  source 1..20: mol_type = other RNA
tcaaggaagatggcatttct

SEQ ID NO: 569 - RNA, 20 nt, synthetic construct
  misc_feature 1..20: note = Description of Artificial Sequence: Synthetic oligonucleotide
  source 1..20: mol_type = other RNA
tcaaggaagatggcatttct

SEQ ID NO: 570 - RNA, 20 nt, synthetic construct
  misc_feature 1..20: note = Description of Artificial Sequence: Synthetic oligonucleotide
  source 1..20: mol_type = other RNA
tcaaggaagatggcatttct

SEQ ID NO: 571 - RNA, 20 nt, synthetic construct
  misc_feature 1..20: note = Description of Artificial Sequence: Synthetic oligonucleotide
  source 1..20: mol_type = other RNA
tcaaggaagatggcatttct

SEQ ID NO: 572 - RNA, 20 nt, synthetic construct
  misc_feature 1..20: note = Description of Artificial Sequence: Synthetic oligonucleotide
  source 1..20: mol_type = other RNA
tcaaggaagatggcatttct

SEQ ID NO: 573 - RNA, 20 nt, synthetic construct
  misc_feature 1..20: note = Description of Artificial Sequence: Synthetic oligonucleotide
  source 1..20: mol_type = other RNA
tcaaggaagatggcatttct

SEQ ID NO: 574 - RNA, 20 nt, synthetic construct
  misc_feature 1..20: note = Description of Artificial Sequence: Synthetic oligonucleotide
  source 1..20: mol_type = other RNA
tcaaggaagatggcatttct

SEQ ID NO: 575 - RNA, 20 nt, synthetic construct
  misc_feature 1..20: note = Description of Artificial Sequence: Synthetic oligonucleotide
  source 1..20: mol_type = other RNA
tcaaggaagatggcatttct

SEQ ID NO: 576 - RNA, 20 nt, synthetic construct
  misc_feature 1..20: note = Description of Artificial Sequence: Synthetic oligonucleotide
  source 1..20: mol_type = other RNA
tcaaggaagatggcatttct

SEQ ID NO: 577 - RNA, 20 nt, synthetic construct
  misc_feature 1..20: note = Description of Artificial Sequence: Synthetic oligonucleotide
  source 1..20: mol_type = other RNA
tcaaggaagatggcatttct

SEQ ID NO: 578 - RNA, 20 nt, synthetic construct
  misc_feature 1..20: note = Description of Artificial Sequence: Synthetic oligonucleotide
  source 1..20: mol_type = other RNA
tcaaggaagatggcatttct

SEQ ID NO: 579 - RNA, 20 nt, synthetic construct
  misc_feature 1..20: note = Description of Artificial Sequence: Synthetic oligonucleotide
  source 1..20: mol_type = other RNA
tcaaggaagatggcatttct

SEQ ID NO: 580 - RNA, 20 nt, synthetic construct
  misc_feature 1..20: note = Description of Artificial Sequence: Synthetic oligonucleotide
  source 1..20: mol_type = other RNA
tcaaggaagatggcatttct

SEQ ID NO: 581 - RNA, 20 nt, synthetic construct
  misc_feature 1..20: note = Description of Artificial Sequence: Synthetic oligonucleotide
  source 1..20: mol_type = other RNA
tcaaggaagatggcatttct

SEQ ID NO: 582 - RNA, 20 nt, synthetic construct
  misc_feature 1..20: note = Description of Artificial Sequence: Synthetic oligonucleotide
  source 1..20: mol_type = other RNA
tcaaggaagatggcatttct

SEQ ID NO: 583 - RNA, 20 nt, synthetic construct
  misc_feature 1..20: note = Description of Artificial Sequence: Synthetic oligonucleotide
  source 1..20: mol_type = other RNA
tcaaggaagatggcatttct

SEQ ID NO: 584 - RNA, 20 nt, synthetic construct
  misc_feature 1..20: note = Description of Artificial Sequence: Synthetic oligonucleotide
  source 1..20: mol_type = other RNA
tcaaggaagatggcatttct

SEQ ID NO: 585 - RNA, 20 nt, synthetic construct
  misc_feature 1..20: note = Description of Artificial Sequence: Synthetic oligonucleotide
  source 1..20: mol_type = other RNA
tcaaggaagatggcatttct

SEQ ID NO: 586 - RNA, 20 nt, synthetic construct
  misc_feature 1..20: note = Description of Artificial Sequence: Synthetic oligonucleotide
  source 1..20: mol_type = other RNA
tcaaggaagatggcatttct

SEQ ID NO: 587 - RNA, 20 nt, synthetic construct
  misc_feature 1..20: note = Description of Artificial Sequence: Synthetic oligonucleotide
  source 1..20: mol_type = other RNA
tcaaggaagatggcatttct

SEQ ID NO: 588 - RNA, 20 nt, synthetic construct
  misc_feature 1..20: note = Description of Artificial Sequence: Synthetic oligonucleotide
  source 1..20: mol_type = other RNA
tcaaggaagatggcatttct

SEQ ID NO: 589 - RNA, 20 nt, synthetic construct
  misc_feature 1..20: note = Description of Artificial Sequence: Synthetic oligonucleotide
  source 1..20: mol_type = other RNA
tcaaggaagatggcatttct

SEQ ID NO: 590 - RNA, 20 nt, synthetic construct
  misc_feature 1..20: note = Description of Artificial Sequence: Synthetic oligonucleotide
  source 1..20: mol_type = other RNA
tcaaggaagatggcatttct

SEQ ID NO: 591 - RNA, 20 nt, synthetic construct
  misc_feature 1..20: note = Description of Artificial Sequence: Synthetic oligonucleotide
  source 1..20: mol_type = other RNA
tcaaggaagatggcatttct

SEQ ID NO: 592 - RNA, 20 nt, synthetic construct
  misc_feature 1..20: note = Description of Artificial Sequence: Synthetic oligonucleotide
  source 1..20: mol_type = other RNA
tcaaggaagatggcatttct

SEQ ID NO: 593 - RNA, 20 nt, synthetic construct
  misc_feature 1..20: note = Description of Artificial Sequence: Synthetic oligonucleotide
  source 1..20: mol_type = other RNA
tcaaggaagatggcatttct

SEQ ID NO: 594 - RNA, 20 nt, synthetic construct
  misc_feature 1..20: note = Description of Artificial Sequence: Synthetic oligonucleotide
  source 1..20: mol_type = other RNA
tcaaggaagatggcatttct

SEQ ID NO: 595 - RNA, 20 nt, synthetic construct
  misc_feature 1..20: note = Description of Artificial Sequence: Synthetic oligonucleotide
  source 1..20: mol_type = other RNA
tcaaggaagatggcatttct

SEQ ID NO: 596 - RNA, 20 nt, synthetic construct
  misc_feature 1..20: note = Description of Artificial Sequence: Synthetic oligonucleotide
  source 1..20: mol_type = other RNA
tcaaggaagatggcatttct

SEQ ID NO: 597 - RNA, 20 nt, synthetic construct
  misc_feature 1..20: note = Description of Artificial Sequence: Synthetic oligonucleotide
  source 1..20: mol_type = other RNA
tcaaggaagatggcatttct

SEQ ID NO: 598 - RNA, 20 nt, synthetic construct
  misc_feature 1..20: note = Description of Artificial Sequence: Synthetic oligonucleotide
  source 1..20: mol_type = other RNA
tcaaggaagatggcatttct

SEQ ID NO: 599 - RNA, 20 nt, synthetic construct
  misc_feature 1..20: note = Description of Artificial Sequence: Synthetic oligonucleotide
  source 1..20: mol_type = other RNA
tcaaggaagatggcatttct

SEQ ID NO: 600 - RNA, 20 nt, synthetic construct
  misc_feature 1..20: note = Description of Artificial Sequence: Synthetic oligonucleotide
  source 1..20: mol_type = other RNA
tcaaggaagatggcatttct

SEQ ID NO: 601 - RNA, 20 nt, synthetic construct
  misc_feature 1..20: note = Description of Artificial Sequence: Synthetic oligonucleotide
  source 1..20: mol_type = other RNA
tcaaggaagatggcatttct

SEQ ID NO: 602 - RNA, 20 nt, synthetic construct
  misc_feature 1..20: note = Description of Artificial Sequence: Synthetic oligonucleotide
  source 1..20: mol_type = other RNA
tcaaggaagatggcatttct

SEQ ID NO: 603 - RNA, 20 nt, synthetic construct
  misc_feature 1..20: note = Description of Artificial Sequence: Synthetic oligonucleotide
  source 1..20: mol_type = other RNA
tcaaggaagatggcatttct

SEQ ID NO: 604 - RNA, 20 nt, synthetic construct
  misc_feature 1..20: note = Description of Artificial Sequence: Synthetic oligonucleotide
  source 1..20: mol_type = other RNA
tcaaggaagatggcatttct

SEQ ID NO: 605 - RNA, 20 nt, synthetic construct
  misc_feature 1..20: note = Description of Artificial Sequence: Synthetic oligonucleotide
  source 1..20: mol_type = other RNA
tcaaggaagatggcatttct

SEQ ID NO: 606 - RNA, 20 nt, synthetic construct
  modified_base 11: mod_base = OTHER; note = thymine
  misc_feature 1..20: note = Description of Combined DNA/RNA Molecule: Synthetic oligonucleotide
  source 1..20: mol_type = other RNA
tcaaggaagatggcatttct

SEQ ID NO: 607 - RNA, 20 nt, synthetic construct
  modified_base 11: mod_base = OTHER; note = thymine
  misc_feature 1..20: note = Description of Combined DNA/RNA Molecule: Synthetic oligonucleotide
  source 1..20: mol_type = other RNA
tcaaggaagatggcatttct

SEQ ID NO: 608 - RNA, 20 nt, synthetic construct
  modified_base 11: mod_base = OTHER; note = thymine
  misc_feature 1..20: note = Description of Combined DNA/RNA Molecule: Synthetic oligonucleotide
  source 1..20: mol_type = other RNA
tcaaggaagatggcatttct

SEQ ID NO: 609 - RNA, 20 nt, synthetic construct
  modified_base 11: mod_base = OTHER; note = thymine
  misc_feature 1..20: note = Description of Combined DNA/RNA Molecule: Synthetic oligonucleotide
  source 1..20: mol_type = other RNA
tcaaggaagatggcatttct

SEQ ID NO: 610 - RNA, 20 nt, synthetic construct
  modified_base 11: mod_base = OTHER; note = thymine
  misc_feature 1..20: note = Description of Combined DNA/RNA Molecule: Synthetic oligonucleotide
  source 1..20: mol_type = other RNA
tcaaggaagatggcatttct

SEQ ID NO: 611 - RNA, 20 nt, synthetic construct
  modified_base 11: mod_base = OTHER; note = thymine
  misc_feature 1..20: note = Description of Combined DNA/RNA Molecule: Synthetic oligonucleotide
  source 1..20: mol_type = other RNA
tcaaggaagatggcatttct

SEQ ID NO: 612 - RNA, 20 nt, synthetic construct
  modified_base 11: mod_base = OTHER; note = thymine
  misc_feature 1..20: note = Description of Combined DNA/RNA Molecule: Synthetic oligonucleotide
  source 1..20: mol_type = other RNA
tcaaggaagatggcatttct

SEQ ID NO: 613 - RNA, 20 nt, synthetic construct
  misc_feature 1..20: note = Description of Artificial Sequence: Synthetic oligonucleotide
  source 1..20: mol_type = other RNA
tcaaggaagatggcatttct

SEQ ID NO: 614 - RNA, 20 nt, synthetic construct
  misc_feature 1..20: note = Description of Artificial Sequence: Synthetic oligonucleotide
  source 1..20: mol_type = other RNA
tcaaggaagatggcatttct

SEQ ID NO: 615 - RNA, 20 nt, synthetic construct
  misc_feature 1..20: note = Description of Artificial Sequence: Synthetic oligonucleotide
  source 1..20: mol_type = other RNA
tcaaggaagatggcatttct

SEQ ID NO: 616 - RNA, 20 nt, synthetic construct
  misc_feature 1..20: note = Description of Artificial Sequence: Synthetic oligonucleotide
  source 1..20: mol_type = other RNA
tcaaggaagatggcatttct

SEQ ID NO: 617 - RNA, 20 nt, synthetic construct
  misc_feature 1..20: note = Description of Artificial Sequence: Synthetic oligonucleotide
  source 1..20: mol_type = other RNA
tcaaggaagatggcatttct

SEQ ID NO: 618 - RNA, 20 nt, synthetic construct
  misc_feature 1..20: note = Description of Artificial Sequence: Synthetic oligonucleotide
  source 1..20: mol_type = other RNA
tcaaggaagatggcatttct

SEQ ID NO: 619 - RNA, 20 nt, synthetic construct
  misc_feature 1..20: note = Description of Artificial Sequence: Synthetic oligonucleotide
  source 1..20: mol_type = other RNA
tcaaggaagatggcatttct

SEQ ID NO: 620 - RNA, 20 nt, synthetic construct
  misc_feature 1..20: note = Description of Artificial Sequence: Synthetic oligonucleotide
  source 1..20: mol_type = other RNA
tcaaggaagatggcatttct

SEQ ID NO: 621 - RNA, 20 nt, synthetic construct
  misc_feature 1..20: note = Description of Artificial Sequence: Synthetic oligonucleotide
  source 1..20: mol_type = other RNA
tcaaggaagatggcatttct

SEQ ID NO: 622 - RNA, 20 nt, synthetic construct
  misc_feature 1..20: note = Description of Artificial Sequence: Synthetic oligonucleotide
  source 1..20: mol_type = other RNA
tcaaggaagatggcatttct

SEQ ID NO: 623 - RNA, 20 nt, synthetic construct
  misc_feature 1..20: note = Description of Artificial Sequence: Synthetic oligonucleotide
  source 1..20: mol_type = other RNA
tcaaggaagatggcatttct

SEQ ID NO: 624 - RNA, 20 nt, synthetic construct
  misc_feature 1..20: note = Description of Artificial Sequence: Synthetic oligonucleotide
  source 1..20: mol_type = other RNA
tcaaggaagatggcatttct

SEQ ID NO: 625 - RNA, 20 nt, synthetic construct
  misc_feature 1..20: note = Description of Artificial Sequence: Synthetic oligonucleotide
  source 1..20: mol_type = other RNA
tcaaggaagatggcatttct

SEQ ID NO: 626 - RNA, 20 nt, synthetic construct
  misc_feature 1..20: note = Description of Artificial Sequence: Synthetic oligonucleotide
  source 1..20: mol_type = other RNA
tcaaggaagatggcatttct

SEQ ID NO: 627 - RNA, 20 nt, synthetic construct
  misc_feature 1..20: note = Description of Artificial Sequence: Synthetic oligonucleotide
  source 1..20: mol_type = other RNA
tcaaggaagatggcatttct

SEQ ID NO: 628 - RNA, 20 nt, synthetic construct
  misc_feature 1..20: note = Description of Artificial Sequence: Synthetic oligonucleotide
  source 1..20: mol_type = other RNA
tcaaggaagatggcatttct

SEQ ID NO: 629 - RNA, 20 nt, synthetic construct
  misc_feature 1..20: note = Description of Artificial Sequence: Synthetic oligonucleotide
  source 1..20: mol_type = other RNA
tcaaggaagatggcatttct

SEQ ID NO: 630 - RNA, 20 nt, synthetic construct
  misc_feature 1..20: note = Description of Artificial Sequence: Synthetic oligonucleotide
  source 1..20: mol_type = other RNA
tcaaggaagatggcatttct

SEQ ID NO: 631 - RNA, 20 nt, synthetic construct
  misc_feature 1..20: note = Description of Artificial Sequence: Synthetic oligonucleotide
  source 1..20: mol_type = other RNA
tcaaggaagatggcatttct

SEQ ID NO: 632 - RNA, 20 nt, synthetic construct
  misc_feature 1..20: note = Description of Artificial Sequence: Synthetic oligonucleotide
  source 1..20: mol_type = other RNA
tcaaggaagatggcatttct

SEQ ID NO: 633 - RNA, 20 nt, synthetic construct
  misc_feature 1..20: note = Description of Artificial Sequence: Synthetic oligonucleotide
  source 1..20: mol_type = other RNA
tcaaggaagatggcatttct

SEQ ID NO: 634 - RNA, 20 nt, synthetic construct
  misc_feature 1..20: note = Description of Artificial Sequence: Synthetic oligonucleotide
  source 1..20: mol_type = other RNA
tcaaggaagatggcatttct

SEQ ID NO: 635 - RNA, 20 nt, synthetic construct
  misc_feature 1..20: note = Description of Artificial Sequence: Synthetic oligonucleotide
  source 1..20: mol_type = other RNA
tcaaggaagatggcatttct

SEQ ID NO: 636 - RNA, 20 nt, synthetic construct
  misc_feature 1..20: note = Description of Artificial Sequence: Synthetic oligonucleotide
  source 1..20: mol_type = other RNA
tcaaggaagatggcatttct

SEQ ID NO: 637 - RNA, 20 nt, synthetic construct
  misc_feature 1..20: note = Description of Artificial Sequence: Synthetic oligonucleotide
  source 1..20: mol_type = other RNA
tcaaggaagatggcatttct

SEQ ID NO: 638 - RNA, 20 nt, synthetic construct
  misc_feature 1..20: note = Description of Artificial Sequence: Synthetic oligonucleotide
  source 1..20: mol_type = other RNA
tcaaggaagatggcatttct

SEQ ID NO: 639 - RNA, 20 nt, synthetic construct
  misc_feature 1..20: note = Description of Artificial Sequence: Synthetic oligonucleotide
  source 1..20: mol_type = other RNA
tcaaggaagatggcatttct

SEQ ID NO: 640 - RNA, 20 nt, synthetic construct
  misc_feature 1..20: note = Description of Artificial Sequence: Synthetic oligonucleotide
  source 1..20: mol_type = other RNA
tcaaggaagatggcatttct

SEQ ID NO: 641 - RNA, 20 nt, synthetic construct
  misc_feature 1..20: note = Description of Artificial Sequence: Synthetic oligonucleotide
  source 1..20: mol_type = other RNA
tcaaggaagatggcatttct

SEQ ID NO: 642 - RNA, 20 nt, synthetic construct
  misc_feature 1..20: note = Description of Artificial Sequence: Synthetic oligonucleotide
  source 1..20: mol_type = other RNA
tcaaggaagatggcatttct

SEQ ID NO: 643 - RNA, 20 nt, synthetic construct
  misc_feature 1..20: note = Description of Artificial Sequence: Synthetic oligonucleotide
  source 1..20: mol_type = other RNA
tcaaggaagatggcatttct

SEQ ID NO: 644 - RNA, 20 nt, synthetic construct
  misc_feature 1..20: note = Description of Artificial Sequence: Synthetic oligonucleotide
  source 1..20: mol_type = other RNA
tcaaggaagatggcatttct

SEQ ID NO: 645 - RNA, 20 nt, synthetic construct
  misc_feature 1..20: note = Description of Artificial Sequence: Synthetic oligonucleotide
  source 1..20: mol_type = other RNA
tcaaggaagatggcatttct

SEQ ID NO: 646 - RNA, 20 nt, synthetic construct
  misc_feature 1..20: note = Description of Artificial Sequence: Synthetic oligonucleotide
  source 1..20: mol_type = other RNA
tcaaggaagatggcatttct

SEQ ID NO: 647 - RNA, 20 nt, synthetic construct
  misc_feature 1..20: note = Description of Artificial Sequence: Synthetic oligonucleotide
  source 1..20: mol_type = other RNA
tcaaggaagatggcatttct

SEQ ID NO: 648 - RNA, 20 nt, synthetic construct
  misc_feature 1..20: note = Description of Artificial Sequence: Synthetic oligonucleotide
  source 1..20: mol_type = other RNA
tcaaggaagatggcatttct

SEQ ID NO: 649 - RNA, 20 nt, synthetic construct
  misc_feature 1..20: note = Description of Artificial Sequence: Synthetic oligonucleotide
  source 1..20: mol_type = other RNA
tcaaggaagatggcatttct

SEQ ID NO: 650 - RNA, 20 nt, synthetic construct
  misc_feature 1..20: note = Description of Artificial Sequence: Synthetic oligonucleotide
  source 1..20: mol_type = other RNA
tcaaggaagatggcatttct

SEQ ID NO: 651 - RNA, 20 nt, synthetic construct
  misc_feature 1..20: note = Description of Artificial Sequence: Synthetic oligonucleotide
  source 1..20: mol_type = other RNA
tcaaggaagatggcatttct

SEQ ID NO: 652 - RNA, 20 nt, synthetic construct
  misc_feature 1..20: note = Description of Artificial Sequence: Synthetic oligonucleotide
  source 1..20: mol_type = other RNA
tcaaggaagatggcatttct

SEQ ID NO: 653 - RNA, 20 nt, synthetic construct
  misc_feature 1..20: note = Description of Artificial Sequence: Synthetic oligonucleotide
  source 1..20: mol_type = other RNA
tcaaggaagatggcatttct

SEQ ID NO: 654 - RNA, 20 nt, synthetic construct
  misc_feature 1..20: note = Description of Artificial Sequence: Synthetic oligonucleotide
  source 1..20: mol_type = other RNA
tcaaggaagatggcatttct

SEQ ID NO: 655 - RNA, 20 nt, synthetic construct
  misc_feature 1..20: note = Description of Artificial Sequence: Synthetic oligonucleotide
  source 1..20: mol_type = other RNA
tcaaggaagatggcatttct

SEQ ID NO: 656 - RNA, 20 nt, synthetic construct
  misc_feature 1..20: note = Description of Artificial Sequence: Synthetic oligonucleotide
  source 1..20: mol_type = other RNA
tcaaggaagatggcatttct

SEQ ID NO: 657 - RNA, 20 nt, synthetic construct
  misc_feature 1..20: note = Description of Artificial Sequence: Synthetic oligonucleotide
  source 1..20: mol_type = other RNA
tcaaggaagatggcatttct

SEQ ID NO: 658 - RNA, 20 nt, synthetic construct
  misc_feature 1..20: note = Description of Artificial Sequence: Synthetic oligonucleotide
  source 1..20: mol_type = other RNA
tcaaggaagatggcatttct

SEQ ID NO: 659 - RNA, 20 nt, synthetic construct
  misc_feature 1..20: note = Description of Artificial Sequence: Synthetic oligonucleotide
  source 1..20: mol_type = other RNA
tcaaggaagatggcatttct

SEQ ID NO: 660 - RNA, 20 nt, synthetic construct
  misc_feature 1..20: note = Description of Artificial Sequence: Synthetic oligonucleotide
  source 1..20: mol_type = other RNA
tcaaggaagatggcatttct

SEQ ID NO: 661 - RNA, 20 nt, synthetic construct
  misc_feature 1..20: note = Description of Artificial Sequence: Synthetic oligonucleotide
  source 1..20: mol_type = other RNA
tcaaggaagatggcatttct

SEQ ID NO: 662 - RNA, 20 nt, synthetic construct
  misc_feature 1..20: note = Description of Artificial Sequence: Synthetic oligonucleotide
  source 1..20: mol_type = other RNA
tcaaggaagatggcatttct

SEQ ID NO: 663 - RNA, 20 nt, synthetic construct
  misc_feature 1..20: note = Description of Artificial Sequence: Synthetic oligonucleotide
  source 1..20: mol_type = other RNA
tcaaggaagatggcatttct

SEQ ID NO: 664 - RNA, 20 nt, synthetic construct
  misc_feature 1..20: note = Description of Artificial Sequence: Synthetic oligonucleotide
  source 1..20: mol_type = other RNA
tcaaggaagatggcatttct

SEQ ID NO: 665 - RNA, 20 nt, synthetic construct
  misc_feature 1..20: note = Description of Artificial Sequence: Synthetic oligonucleotide
  source 1..20: mol_type = other RNA
tcaaggaagatggcatttct

SEQ ID NO: 666 - RNA, 20 nt, synthetic construct
  misc_feature 1..20: note = Description of Artificial Sequence: Synthetic oligonucleotide
  source 1..20: mol_type = other RNA
tcaaggaagatggcatttct

SEQ ID NO: 667 - RNA, 20 nt, synthetic construct
  misc_feature 1..20: note = Description of Artificial Sequence: Synthetic oligonucleotide
  source 1..20: mol_type = other RNA
tcaaggaagatggcatttct

SEQ ID NO: 668 - RNA, 20 nt, synthetic construct
  misc_feature 1..20: note = Description of Artificial Sequence: Synthetic oligonucleotide
  source 1..20: mol_type = other RNA
tcaaggaagatggcatttct

SEQ ID NO: 669 - RNA, 20 nt, synthetic construct
  misc_feature 1..20: note = Description of Artificial Sequence: Synthetic oligonucleotide
  source 1..20: mol_type = other RNA
tcaaggaagatggcatttct

SEQ ID NO: 670 - RNA, 20 nt, synthetic construct
  misc_feature 1..20: note = Description of Artificial Sequence: Synthetic oligonucleotide
  source 1..20: mol_type = other RNA
tcaaggaagatggcatttct

SEQ ID NO: 671 - RNA, 20 nt, synthetic construct
  misc_feature 1..20: note = Description of Artificial Sequence: Synthetic oligonucleotide
  source 1..20: mol_type = other RNA
tcaaggaagatggcatttct

SEQ ID NO: 672 - RNA, 20 nt, synthetic construct
  misc_feature 1..20: note = Description of Artificial Sequence: Synthetic oligonucleotide
  source 1..20: mol_type = other RNA
tcaaggaagatggcatttct

SEQ ID NO: 673 - RNA, 20 nt, synthetic construct
  misc_feature 1..20: note = Description of Artificial Sequence: Synthetic oligonucleotide
  source 1..20: mol_type = other RNA
tcaaggaagatggcatttct

SEQ ID NO: 674 - RNA, 20 nt, synthetic construct
  misc_feature 1..20: note = Description of Artificial Sequence: Synthetic oligonucleotide
  source 1..20: mol_type = other RNA
tcaaggaagatggcatttct

SEQ ID NO: 675 - RNA, 20 nt, synthetic construct
  misc_feature 1..20: note = Description of Artificial Sequence: Synthetic oligonucleotide
  source 1..20: mol_type = other RNA
tcaaggaagatggcatttct

SEQ ID NO: 676 - RNA, 20 nt, synthetic construct
  misc_feature 1..20: note = Description of Artificial Sequence: Synthetic oligonucleotide
  source 1..20: mol_type = other RNA
tcaaggaagatggcatttct

SEQ ID NO: 677 - RNA, 20 nt, synthetic construct
  misc_feature 1..20: note = Description of Artificial Sequence: Synthetic oligonucleotide
  source 1..20: mol_type = other RNA
tcaaggaagatggcatttct

SEQ ID NO: 678 - RNA, 20 nt, synthetic construct
  misc_feature 1..20: note = Description of Artificial Sequence: Synthetic oligonucleotide
  source 1..20: mol_type = other RNA
tcaaggaagatggcatttct

SEQ ID NO: 679 - RNA, 20 nt, synthetic construct
  misc_feature 1..20: note = Description of Artificial Sequence: Synthetic oligonucleotide
  source 1..20: mol_type = other RNA
tcaaggaagatggcatttct

SEQ ID NO: 680 - RNA, 20 nt, synthetic construct
  misc_feature 1..20: note = Description of Artificial Sequence: Synthetic oligonucleotide
  source 1..20: mol_type = other RNA
tcaaggaagatggcatttct

SEQ ID NO: 681 - RNA, 20 nt, synthetic construct
  misc_feature 1..20: note = Description of Artificial Sequence: Synthetic oligonucleotide
  source 1..20: mol_type = other RNA
tcaaggaagatggcatttct

SEQ ID NO: 682 - RNA, 20 nt, synthetic construct
  misc_feature 1..20: note = Description of Artificial Sequence: Synthetic oligonucleotide
  source 1..20: mol_type = other RNA
tcaaggaagatggcatttct

SEQ ID NO: 683 - RNA, 20 nt, synthetic construct
  misc_feature 1..20: note = Description of Artificial Sequence: Synthetic oligonucleotide
  source 1..20: mol_type = other RNA
tcaaggaagatggcatttct

SEQ ID NO: 684 - RNA, 20 nt, synthetic construct
  misc_feature 1..20: note = Description of Artificial Sequence: Synthetic oligonucleotide
  source 1..20: mol_type = other RNA
tcaaggaagatggcatttct

SEQ ID NO: 685 - RNA, 20 nt, synthetic construct
  misc_feature 1..20: note = Description of Artificial Sequence: Synthetic oligonucleotide
  source 1..20: mol_type = other RNA
tcaaggaagatggcatttct

SEQ ID NO: 686 - RNA, 20 nt, synthetic construct
  misc_feature 1..20: note = Description of Artificial Sequence: Synthetic oligonucleotide
  source 1..20: mol_type = other RNA
tcaaggaagatggcatttct

SEQ ID NO: 687 - RNA, 20 nt, synthetic construct
  misc_feature 1..20: note = Description of Artificial Sequence: Synthetic oligonucleotide
  source 1..20: mol_type = other RNA
tcaaggaagatggcatttct

SEQ ID NO: 688 - RNA, 20 nt, synthetic construct
  misc_feature 1..20: note = Description of Artificial Sequence: Synthetic oligonucleotide
  source 1..20: mol_type = other RNA
tcaaggaagatggcatttct

SEQ ID NO: 689 - RNA, 20 nt, synthetic construct
  misc_feature 1..20: note = Description of Artificial Sequence: Synthetic oligonucleotide
  source 1..20: mol_type = other RNA
tcaaggaagatggcatttct

SEQ ID NO: 690 - RNA, 20 nt, synthetic construct
  misc_feature 1..20: note = Description of Artificial Sequence: Synthetic oligonucleotide
  source 1..20: mol_type = other RNA
tcaaggaagatggcatttct

SEQ ID NO: 691 - RNA, 20 nt, synthetic construct
  misc_feature 1..20: note = Description of Artificial Sequence: Synthetic oligonucleotide
  source 1..20: mol_type = other RNA
tcaaggaagatggcatttct

SEQ ID NO: 692 - RNA, 20 nt, synthetic construct
  misc_feature 1..20: note = Description of Artificial Sequence: Synthetic oligonucleotide
  source 1..20: mol_type = other RNA
tcaaggaagatggcatttct

SEQ ID NO: 693 - RNA, 20 nt, synthetic construct
  misc_feature 1..20: note = Description of Artificial Sequence: Synthetic oligonucleotide
  source 1..20: mol_type = other RNA
tcaaggaagatggcatttct

SEQ ID NO: 694 - RNA, 20 nt, synthetic construct
  misc_feature 1..20: note = Description of Artificial Sequence: Synthetic oligonucleotide
  source 1..20: mol_type = other RNA
tcaaggaagatggcatttct

SEQ ID NO: 695 - RNA, 20 nt, synthetic construct
  misc_feature 1..20: note = Description of Artificial Sequence: Synthetic oligonucleotide
  source 1..20: mol_type = other RNA
tcaaggaagatggcatttct

SEQ ID NO: 696 - RNA, 20 nt, synthetic construct
  misc_feature 1..20: note = Description of Artificial Sequence: Synthetic oligonucleotide
  source 1..20: mol_type = other RNA
tcaaggaagatggcatttct

SEQ ID NO: 697 - RNA, 20 nt, synthetic construct
  misc_feature 1..20: note = Description of Artificial Sequence: Synthetic oligonucleotide
  source 1..20: mol_type = other RNA
tcaaggaagatggcatttct

SEQ ID NO: 698 - RNA, 20 nt, synthetic construct
  misc_feature 1..20: note = Description of Artificial Sequence: Synthetic oligonucleotide
  source 1..20: mol_type = other RNA
tcaaggaagatggcatttct

SEQ ID NO: 699 - RNA, 20 nt, synthetic construct
  misc_feature 1..20: note = Description of Artificial Sequence: Synthetic oligonucleotide
  source 1..20: mol_type = other RNA
tcaaggaagatggcatttct

SEQ ID NO: 700 - RNA, 20 nt, synthetic construct
  misc_feature 1..20: note = Description of Artificial Sequence: Synthetic oligonucleotide
  source 1..20: mol_type = other RNA
tcaaggaagatggcatttct

SEQ ID NO: 701 - RNA, 20 nt, synthetic construct
  misc_feature 1..20: note = Description of Artificial Sequence: Synthetic oligonucleotide
  source 1..20: mol_type = other RNA
tcaaggaagatggcatttct

SEQ ID NO: 702 - RNA, 20 nt, synthetic construct
  misc_feature 1..20: note = Description of Artificial Sequence: Synthetic oligonucleotide
  source 1..20: mol_type = other RNA
tcaaggaagatggcatttct

SEQ ID NO: 703 - RNA, 20 nt, synthetic construct
  misc_feature 1..20: note = Description of Artificial Sequence: Synthetic oligonucleotide
  source 1..20: mol_type = other RNA
tcaaggaagatggcatttct

SEQ ID NO: 704 - RNA, 20 nt, synthetic construct
  misc_feature 1..20: note = Description of Artificial Sequence: Synthetic oligonucleotide
  source 1..20: mol_type = other RNA
tcaaggaagatggcatttct

SEQ ID NO: 705 - RNA, 20 nt, synthetic construct
  misc_feature 1..20: note = Description of Artificial Sequence: Synthetic oligonucleotide
  source 1..20: mol_type = other RNA
tcaaggaagatggcatttct

SEQ ID NO: 706 - RNA, 20 nt, synthetic construct
  misc_feature 1..20: note = Description of Artificial Sequence: Synthetic oligonucleotide
  source 1..20: mol_type = other RNA
tcaaggaagatggcatttct

SEQ ID NO: 707 - RNA, 20 nt, synthetic construct
  misc_feature 1..20: note = Description of Artificial Sequence: Synthetic oligonucleotide
  source 1..20: mol_type = other RNA
tcaaggaagatggcatttct

SEQ ID NO: 708 - RNA, 20 nt, synthetic construct
  misc_feature 1..20: note = Description of Artificial Sequence: Synthetic oligonucleotide
  source 1..20: mol_type = other RNA
tcaaggaagatggcatttct

SEQ ID NO: 709 - RNA, 20 nt, synthetic construct
  misc_feature 1..20: note = Description of Artificial Sequence: Synthetic oligonucleotide
  source 1..20: mol_type = other RNA
tcaaggaagatggcatttct

SEQ ID NO: 710 - RNA, 20 nt, synthetic construct
  misc_feature 1..20: note = Description of Artificial Sequence: Synthetic oligonucleotide
  source 1..20: mol_type = other RNA
tcaaggaagatggcatttct

SEQ ID NO: 711 - RNA, 20 nt, synthetic construct
  misc_feature 1..20: note = Description of Artificial Sequence: Synthetic oligonucleotide
  source 1..20: mol_type = other RNA
tcaaggaagatggcatttct

SEQ ID NO: 712 - RNA, 20 nt, synthetic construct
  misc_feature 1..20: note = Description of Artificial Sequence: Synthetic oligonucleotide
  source 1..20: mol_type = other RNA
tcaaggaagatggcatttct

SEQ ID NO: 713 - RNA, 20 nt, synthetic construct
  misc_feature 1..20: note = Description of Artificial Sequence: Synthetic oligonucleotide
  source 1..20: mol_type = other RNA
tcaaggaagatggcatttct

SEQ ID NO: 714 - RNA, 20 nt, synthetic construct
  misc_feature 1..20: note = Description of Artificial Sequence: Synthetic oligonucleotide
  source 1..20: mol_type = other RNA
tcaaggaagatggcatttct

SEQ ID NO: 715 - RNA, 20 nt, synthetic construct
  misc_feature 1..20: note = Description of Artificial Sequence: Synthetic oligonucleotide
  source 1..20: mol_type = other RNA
tcaaggaagatggcatttct

SEQ ID NO: 716 - RNA, 20 nt, synthetic construct
  misc_feature 1..20: note = Description of Artificial Sequence: Synthetic oligonucleotide
  source 1..20: mol_type = other RNA
tcaaggaagatggcatttct

SEQ ID NO: 717 - RNA, 20 nt, synthetic construct
  misc_feature 1..20: note = Description of Artificial Sequence: Synthetic oligonucleotide
  source 1..20: mol_type = other RNA
tcaaggaagatggcatttct

SEQ ID NO: 718 - RNA, 20 nt, synthetic construct
  misc_feature 1..20: note = Description of Artificial Sequence: Synthetic oligonucleotide
  source 1..20: mol_type = other RNA
tcaaggaagatggcatttct

SEQ ID NO: 719 - RNA, 20 nt, synthetic construct
  misc_feature 1..20: note = Description of Artificial Sequence: Synthetic oligonucleotide
  source 1..20: mol_type = other RNA
tcaaggaagatggcatttct

SEQ ID NO: 720 - RNA, 20 nt, synthetic construct
  misc_feature 1..20: note = Description of Artificial Sequence: Synthetic oligonucleotide
  source 1..20: mol_type = other RNA
tcaaggaagatggcatttct

SEQ ID NO: 721 - RNA, 20 nt, synthetic construct
  misc_feature 1..20: note = Description of Artificial Sequence: Synthetic oligonucleotide
  source 1..20: mol_type = other RNA
tcaaggaagatggcatttct

SEQ ID NO: 722 - RNA, 20 nt, synthetic construct
  misc_feature 1..20: note = Description of Artificial Sequence: Synthetic oligonucleotide
  source 1..20: mol_type = other RNA
tcaaggaagatggcatttct

SEQ ID NO: 723 - RNA, 20 nt, synthetic construct
  misc_feature 1..20: note = Description of Artificial Sequence: Synthetic oligonucleotide
  source 1..20: mol_type = other RNA
tcaaggaagatggcatttct

SEQ ID NO: 724 - RNA, 20 nt, synthetic construct
  misc_feature 1..20: note = Description of Artificial Sequence: Synthetic oligonucleotide
  source 1..20: mol_type = other RNA
tcaaggaagatggcatttct

SEQ ID NO: 725 - RNA, 20 nt, synthetic construct
  misc_feature 1..20: note = Description of Artificial Sequence: Synthetic oligonucleotide
  source 1..20: mol_type = other RNA
tcaaggaagatggcatttct

SEQ ID NO: 726 - RNA, 20 nt, synthetic construct
  misc_feature 1..20: note = Description of Artificial Sequence: Synthetic oligonucleotide
  source 1..20: mol_type = other RNA
tcaaggaagatggcatttct

SEQ ID NO: 727 - RNA, 20 nt, synthetic construct
  misc_feature 1..20: note = Description of Artificial Sequence: Synthetic oligonucleotide
  source 1..20: mol_type = other RNA
tcaaggaagatggcatttct

SEQ ID NO: 728 - RNA, 20 nt, synthetic construct
  misc_feature 1..20: note = Description of Artificial Sequence: Synthetic oligonucleotide
  source 1..20: mol_type = other RNA
tcaaggaagatggcatttct

SEQ ID NO: 729 - RNA, 20 nt, synthetic construct
  misc_feature 1..20: note = Description of Artificial Sequence: Synthetic oligonucleotide
  source 1..20: mol_type = other RNA
tcaaggaagatggcatttct

SEQ ID NO: 730 - RNA, 20 nt, synthetic construct
  misc_feature 1..20: note = Description of Artificial Sequence: Synthetic oligonucleotide
  source 1..20: mol_type = other RNA
tcaaggaagatggcatttct

SEQ ID NO: 731 - RNA, 20 nt, synthetic construct
  misc_feature 1..20: note = Description of Artificial Sequence: Synthetic oligonucleotide
  source 1..20: mol_type = other RNA
tcaaggaagatggcatttct

SEQ ID NO: 732 - RNA, 20 nt, synthetic construct
  misc_feature 1..20: note = Description of Artificial Sequence: Synthetic oligonucleotide
  source 1..20: mol_type = other RNA
tcaaggaagatggcatttct

SEQ ID NO: 733 - RNA, 20 nt, synthetic construct
  misc_feature 1..20: note = Description of Artificial Sequence: Synthetic oligonucleotide
  source 1..20: mol_type = other RNA
tcaaggaagatggcatttct

SEQ ID NO: 734 - RNA, 20 nt, synthetic construct
  misc_feature 1..20: note = Description of Artificial Sequence: Synthetic oligonucleotide
  source 1..20: mol_type = other RNA
tcaaggaagatggcatttct

SEQ ID NO: 735 - RNA, 20 nt, synthetic construct
  misc_feature 1..20: note = Description of Artificial Sequence: Synthetic oligonucleotide
  source 1..20: mol_type = other RNA
tcaaggaagatggcatttct

SEQ ID NO: 736 - RNA, 20 nt, synthetic construct
  misc_feature 1..20: note = Description of Artificial Sequence: Synthetic oligonucleotide
  source 1..20: mol_type = other RNA
tcaaggaagatggcatttct

SEQ ID NO: 737 - RNA, 20 nt, synthetic construct
  misc_feature 1..20: note = Description of Artificial Sequence: Synthetic oligonucleotide
  source 1..20: mol_type = other RNA
tcaaggaagatggcatttct

SEQ ID NO: 738 - RNA, 20 nt, synthetic construct
  misc_feature 1..20: note = Description of Artificial Sequence: Synthetic oligonucleotide
  source 1..20: mol_type = other RNA
tcaaggaagatggcatttct

SEQ ID NO: 739 - RNA, 30 nt, synthetic construct
  misc_feature 1..30: note = Description of Artificial Sequence: Synthetic oligonucleotide
  source 1..30: mol_type = other RNA
gccaactgggagctggagcgcaccaaccag

SEQ ID NO: 740 - RNA, 20 nt, synthetic construct
  misc_feature 1..20: note = Description of Artificial Sequence: Synthetic oligonucleotide
  source 1..20: mol_type = other RNA
tcaaggaagatggcatttct

SEQ ID NO: 741 - RNA, 20 nt, synthetic construct
  misc_feature 1..20: note = Description of Artificial Sequence: Synthetic oligonucleotide
  source 1..20: mol_type = other RNA
tcaaggaagatggcatttct

SEQ ID NO: 742 - RNA, 20 nt, synthetic construct
  misc_feature 1..20: note = Description of Artificial Sequence: Synthetic oligonucleotide
  source 1..20: mol_type = other RNA
tcaaggaagatggcatttct

SEQ ID NO: 743 - RNA, 20 nt, synthetic construct
  misc_feature 1..20: note = Description of Artificial Sequence: Synthetic oligonucleotide
  source 1..20: mol_type = other RNA
tcaaggaagatggcatttct

SEQ ID NO: 744 - RNA, 20 nt, synthetic construct
  misc_feature 1..20: note = Description of Artificial Sequence: Synthetic oligonucleotide
  source 1..20: mol_type = other RNA
ccttccctgaaggttcctcc

SEQ ID NO: 745 - RNA, 20 nt, synthetic construct
  misc_feature 1..20: note = Description of Artificial Sequence: Synthetic oligonucleotide
  source 1..20: mol_type = other RNA
ccttccctgaaggttcctcc

SEQ ID NO: 746 - RNA, 20 nt, synthetic construct
  misc_feature 1..20: note = Description of Artificial Sequence: Synthetic oligonucleotide
  source 1..20: mol_type = other RNA
ccttccctgaaggttcctcc

SEQ ID NO: 747 - RNA, 20 nt, synthetic construct
  misc_feature 1..20: note = Description of Artificial Sequence: Synthetic oligonucleotide
  source 1..20: mol_type = other RNA
ccttccctgaaggttcctcc

SEQ ID NO: 748 - RNA, 20 nt, synthetic construct
  misc_feature 1..20: note = Description of Artificial Sequence: Synthetic oligonucleotide
  source 1..20: mol_type = other RNA
ccttccctgaaggttcctcc

SEQ ID NO: 749 - RNA, 20 nt, synthetic construct
  misc_feature 1..20: note = Description of Artificial Sequence: Synthetic oligonucleotide
  source 1..20: mol_type = other RNA
ccttccctgaaggttcctcc

SEQ ID NO: 750 - RNA, 20 nt, synthetic construct
  misc_feature 1..20: note = Description of Artificial Sequence: Synthetic oligonucleotide
  source 1..20: mol_type = other RNA
tcaaggaagatggcatttct

SEQ ID NO: 751 - RNA, 20 nt, synthetic construct
  misc_feature 1..20: note = Description of Artificial Sequence: Synthetic oligonucleotide
  source 1..20: mol_type = other RNA
tcaaggaagatggcatttct

SEQ ID NO: 752 - RNA, 20 nt, synthetic construct
  misc_feature 1..20: note = Description of Artificial Sequence: Synthetic oligonucleotide
  source 1..20: mol_type = other RNA
tcaaggaagatggcatttct

SEQ ID NO: 753 - RNA, 19 nt, synthetic construct
  misc_feature 1..19: note = Description of Artificial Sequence: Synthetic oligonucleotide
  source 1..19: mol_type = other RNA
tcaaggaagatggcatttc

SEQ ID NO: 754 - RNA, 18 nt, synthetic construct
  misc_feature 1..18: note = Description of Artificial Sequence: Synthetic oligonucleotide
  source 1..18: mol_type = other RNA
tcaaggaagatggcattt

SEQ ID NO: 755 - RNA, 19 nt, synthetic construct
  misc_feature 1..19: note = Description of Artificial Sequence: Synthetic oligonucleotide
  source 1..19: mol_type = other RNA
caaggaagatggcatttct

SEQ ID NO: 756 - RNA, 20 nt, synthetic construct
  misc_feature 1..20: note = Description of Artificial Sequence: Synthetic oligonucleotide
  source 1..20: mol_type = other RNA
ggccaaacctcggcttacct

SEQ ID NO: 757 - RNA, 20 nt, synthetic construct
  misc_feature 1..20: note = Description of Artificial Sequence: Synthetic oligonucleotide
  source 1..20: mol_type = other RNA
ggccaaacctcggcttacct

SEQ ID NO: 758 - RNA, 20 nt, synthetic construct
  misc_feature 1..20: note = Description of Artificial Sequence: Synthetic oligonucleotide
  source 1..20: mol_type = other RNA
ttctgtaaggtttttatgtg

SEQ ID NO: 759 - RNA, 20 nt, synthetic construct
  misc_feature 1..20: note = Description of Artificial Sequence: Synthetic oligonucleotide
  source 1..20: mol_type = other RNA
atttctgtaaggtttttatg

SEQ ID NO: 760 - RNA, 20 nt, synthetic construct
  misc_feature 1..20: note = Description of Artificial Sequence: Synthetic oligonucleotide
  source 1..20: mol_type = other RNA
ccatttctgtaaggttttta

SEQ ID NO: 761 - RNA, 20 nt, synthetic construct
  misc_feature 1..20: note = Description of Artificial Sequence: Synthetic oligonucleotide
  source 1..20: mol_type = other RNA
atccatttctgtaaggtttt

SEQ ID NO: 762 - RNA, 20 nt, synthetic construct
  misc_feature 1..20: note = Description of Artificial Sequence: Synthetic oligonucleotide
  source 1..20: mol_type = other RNA
catccatttctgtaaggttt

SEQ ID NO: 763 - RNA, 20 nt, synthetic construct
  misc_feature 1..20: note = Description of Artificial Sequence: Synthetic oligonucleotide
  source 1..20: mol_type = other RNA
ccatccatttctgtaaggtt

SEQ ID NO: 764 - RNA, 20 nt, synthetic construct
  misc_feature 1..20: note = Description of Artificial Sequence: Synthetic oligonucleotide
  source 1..20: mol_type = other RNA
gccatccatttctgtaaggt

SEQ ID NO: 765 - RNA, 20 nt, synthetic construct
  misc_feature 1..20: note = Description of Artificial Sequence: Synthetic oligonucleotide
  source 1..20: mol_type = other RNA
agccatccatttctgtaagg

SEQ ID NO: 766 - RNA, 20 nt, synthetic construct
  misc_feature 1..20: note = Description of Artificial Sequence: Synthetic oligonucleotide
  source 1..20: mol_type = other RNA
cagccatccatttctgtaag

SEQ ID NO: 767 - RNA, 20 nt, synthetic construct
  misc_feature 1..20: note = Description of Artificial Sequence: Synthetic oligonucleotide
  source 1..20: mol_type = other RNA
tcagccatccatttctgtaa

SEQ ID NO: 768 - RNA, 20 nt, synthetic construct
  misc_feature 1..20: note = Description of Artificial Sequence: Synthetic oligonucleotide
  source 1..20: mol_type = other RNA
ttcagccatccatttctgta

SEQ ID NO: 769 - RNA, 20 nt, synthetic construct
  misc_feature 1..20: note = Description of Artificial Sequence: Synthetic oligonucleotide
  source 1..20: mol_type = other RNA
cttcagccatccatttctgt

SEQ ID NO: 770 - RNA, 20 nt, synthetic construct
  misc_feature 1..20: note = Description of Artificial Sequence: Synthetic oligonucleotide
  source 1..20: mol_type = other RNA
acttcagccatccatttctg

SEQ ID NO: 771 - RNA, 20 nt, synthetic construct
  misc_feature 1..20: note = Description of Artificial Sequence: Synthetic oligonucleotide
  source 1..20: mol_type = other RNA
aacttcagccatccatttct

SEQ ID NO: 772 - RNA, 20 nt, synthetic construct
  misc_feature 1..20: note = Description of Artificial Sequence: Synthetic oligonucleotide
  source 1..20: mol_type = other RNA
caacttcagccatccatttc

SEQ ID NO: 773 - RNA, 20 nt, synthetic construct
  misc_feature 1..20: note = Description of Artificial Sequence: Synthetic oligonucleotide
  source 1..20: mol_type = other RNA
tcaacttcagccatccattt

SEQ ID NO: 774 - RNA, 20 nt, synthetic construct
  misc_feature 1..20: note = Description of Artificial Sequence: Synthetic oligonucleotide
  source 1..20: mol_type = other RNA
atcaacttcagccatccatt

SEQ ID NO: 775 - RNA, 20 nt, synthetic construct
  misc_feature 1..20: note = Description of Artificial Sequence: Synthetic oligonucleotide
  source 1..20: mol_type = other RNA
catcaacttcagccatccat

SEQ ID NO: 776 - RNA, 20 nt, synthetic construct
  misc_feature 1..20: note = Description of Artificial Sequence: Synthetic oligonucleotide
  source 1..20: mol_type = other RNA
acatcaacttcagccatcca

SEQ ID NO: 777 - RNA, 20 nt, synthetic construct
  misc_feature 1..20: note = Description of Artificial Sequence: Synthetic oligonucleotide
  source 1..20: mol_type = other RNA
aacatcaacttcagccatcc

SEQ ID NO: 778 - RNA, 20 nt, synthetic construct
  misc_feature 1..20: note = Description of Artificial Sequence: Synthetic oligonucleotide
  source 1..20: mol_type = other RNA
gaaaacatcaacttcagcca

SEQ ID NO: 779 - RNA, 20 nt, synthetic construct
  misc_feature 1..20: note = Description of Artificial Sequence: Synthetic oligonucleotide
  source 1..20: mol_type = other RNA
caggaaaacatcaacttcag

SEQ ID NO: 780 - RNA, 20 nt, synthetic construct
  misc_feature 1..20: note = Description of Artificial Sequence: Synthetic oligonucleotide
  source 1..20: mol_type = other RNA
tttcaggaaaacatcaactt

SEQ ID NO: 781 - RNA, 20 nt, synthetic construct
  misc_feature 1..20: note = Description of Artificial Sequence: Synthetic oligonucleotide
  source 1..20: mol_type = other RNA
ctctttcaggaaaacatcaa

SEQ ID NO: 782 - RNA, 20 nt, synthetic construct
  misc_feature 1..20: note = Description of Artificial Sequence: Synthetic oligonucleotide
  source 1..20: mol_type = other RNA
ttcctctttcaggaaaacat

SEQ ID NO: 783 - RNA, 20 nt, synthetic construct
  misc_feature 1..20: note = Description of Artificial Sequence: Synthetic oligonucleotide
  source 1..20: mol_type = other RNA
gccattcctctttcaggaaa

SEQ ID NO: 784 - RNA, 20 nt, synthetic construct
  misc_feature 1..20: note = Description of Artificial Sequence: Synthetic oligonucleotide
  source 1..20: mol_type = other RNA
ggccattcctctttcaggaa

SEQ ID NO: 785 - RNA, 20 nt, synthetic construct
  misc_feature 1..20: note = Description of Artificial Sequence: Synthetic oligonucleotide
  source 1..20: mol_type = other RNA
aggccattcctctttcagga

SEQ ID NO: 786 - RNA, 20 nt, synthetic construct
  misc_feature 1..20: note = Description of Artificial Sequence: Synthetic oligonucleotide
  source 1..20: mol_type = other RNA
caggccattcctctttcagg

SEQ ID NO: 787 - RNA, 20 nt, synthetic construct
  misc_feature 1..20: note = Description of Artificial Sequence: Synthetic oligonucleotide
  source 1..20: mol_type = other RNA
gcaggccattcctctttcag

SEQ ID NO: 788 - RNA, 20 nt, synthetic construct
  misc_feature 1..20: note = Description of Artificial Sequence: Synthetic oligonucleotide
  source 1..20: mol_type = other RNA
ggcaggccattcctctttca

SEQ ID NO: 789 - RNA, 20 nt, synthetic construct
  misc_feature 1..20: note = Description of Artificial Sequence: Synthetic oligonucleotide
  source 1..20: mol_type = other RNA
gggcaggccattcctctttc

SEQ ID NO: 790 - RNA, 20 nt, synthetic construct
  misc_feature 1..20: note = Description of Artificial Sequence: Synthetic oligonucleotide
  source 1..20: mol_type = other RNA
agggcaggccattcctcttt

SEQ ID NO: 791 - RNA, 20 nt, synthetic construct
  misc_feature 1..20: note = Description of Artificial Sequence: Synthetic oligonucleotide
  source 1..20: mol_type = other RNA
cagggcaggccattcctctt

SEQ ID NO: 792 - RNA, 20 nt, synthetic construct
  misc_feature 1..20: note = Description of Artificial Sequence: Synthetic oligonucleotide
  source 1..20: mol_type = other RNA
ccagggcaggccattcctct

SEQ ID NO: 793 - RNA, 20 nt, synthetic construct
  misc_feature 1..20: note = Description of Artificial Sequence: Synthetic oligonucleotide
  source 1..20: mol_type = other RNA
cccagggcaggccattcctc

SEQ ID NO: 794 - RNA, 20 nt, synthetic construct
  misc_feature 1..20: note = Description of Artificial Sequence: Synthetic oligonucleotide
  source 1..20: mol_type = other RNA
ccccagggcaggccattcct

SEQ ID NO: 795 - RNA, 20 nt, synthetic construct
  misc_feature 1..20: note = Description of Artificial Sequence: Synthetic oligonucleotide
  source 1..20: mol_type = other RNA
cccccagggcaggccattcc

SEQ ID NO: 796 - RNA, 20 nt, synthetic construct
  misc_feature 1..20: note = Description of Artificial Sequence: Synthetic oligonucleotide
  source 1..20: mol_type = other RNA
tcccccagggcaggccattc

SEQ ID NO: 797 - RNA, 20 nt, synthetic construct
  misc_feature 1..20: note = Description of Artificial Sequence: Synthetic oligonucleotide
  source 1..20: mol_type = other RNA
atcccccagggcaggccatt

SEQ ID NO: 798 - RNA, 20 nt, synthetic construct
  misc_feature 1..20: note = Description of Artificial Sequence: Synthetic oligonucleotide
  source 1..20: mol_type = other RNA
catcccccagggcaggccat

SEQ ID NO: 799 - RNA, 20 nt, synthetic construct
  misc_feature 1..20: note = Description of Artificial Sequence: Synthetic oligonucleotide
  source 1..20: mol_type = other RNA
gcatcccccagggcaggcca

SEQ ID NO: 800 - RNA, 20 nt, synthetic construct
  misc_feature 1..20: note = Description of Artificial Sequence: Synthetic oligonucleotide
  source 1..20: mol_type = other RNA
agcatcccccagggcaggcc

SEQ ID NO: 801 - RNA, 20 nt, synthetic construct
  misc_feature 1..20: note = Description of Artificial Sequence: Synthetic oligonucleotide
  source 1..20: mol_type = other RNA
cagcatcccccagggcaggc

SEQ ID NO: 802 - RNA, 20 nt, synthetic construct
  misc_feature 1..20: note = Description of Artificial Sequence: Synthetic oligonucleotide
  source 1..20: mol_type = other RNA
tcagcatcccccagggcagg

SEQ ID NO: 803 - RNA, 20 nt, synthetic construct
  misc_feature 1..20: note = Description of Artificial Sequence: Synthetic oligonucleotide
  source 1..20: mol_type = other RNA
ttcagcatcccccagggcag

SEQ ID NO: 804 - RNA, 20 nt, synthetic construct
  misc_feature 1..20: note = Description of Artificial Sequence: Synthetic oligonucleotide
  source 1..20: mol_type = other RNA
tttcagcatcccccagggca

SEQ ID NO: 805 - RNA, 20 nt, synthetic construct
  misc_feature 1..20: note = Description of Artificial Sequence: Synthetic oligonucleotide
  source 1..20: mol_type = other RNA
atttcagcatcccccagggc

SEQ ID NO: 806 - RNA, 20 nt, synthetic construct
  misc_feature 1..20: note = Description of Artificial Sequence: Synthetic oligonucleotide
  source 1..20: mol_type = other RNA
gatttcagcatcccccaggg

SEQ ID NO: 807 - RNA, 20 nt, synthetic construct
  misc_feature 1..20: note = Description of Artificial Sequence: Synthetic oligonucleotide
  source 1..20: mol_type = other RNA
ggatttcagcatcccccagg

SEQ ID NO: 808 - RNA, 20 nt, synthetic construct
  misc_feature 1..20: note = Description of Artificial Sequence: Synthetic oligonucleotide
  source 1..20: mol_type = other RNA
aggatttcagcatcccccag

SEQ ID NO: 809 - RNA, 20 nt, synthetic construct
  misc_feature 1..20: note = Description of Artificial Sequence: Synthetic oligonucleotide
  source 1..20: mol_type = other RNA
caggatttcagcatccccca

SEQ ID NO: 810 - RNA, 20 nt, synthetic construct
  misc_feature 1..20: note = Description of Artificial Sequence: Synthetic oligonucleotide
  source 1..20: mol_type = other RNA
tcaggatttcagcatccccc

SEQ ID NO: 811 - RNA, 20 nt, synthetic construct
  misc_feature 1..20: note = Description of Artificial Sequence: Synthetic oligonucleotide
  source 1..20: mol_type = other RNA
ttcaggatttcagcatcccc

SEQ ID NO: 812 - RNA, 20 nt, synthetic construct
  misc_feature 1..20: note = Description of Artificial Sequence: Synthetic oligonucleotide
  source 1..20: mol_type = other RNA
tttcaggatttcagcatccc

SEQ ID NO: 813 - RNA, 20 nt, synthetic construct
  misc_feature 1..20: note = Description of Artificial Sequence: Synthetic oligonucleotide
  source 1..20: mol_type = other RNA
ttttcaggatttcagcatcc

SEQ ID NO: 814 - RNA, 20 nt, synthetic construct
  misc_feature 1..20: note = Description of Artificial Sequence: Synthetic oligonucleotide
  source 1..20: mol_type = other RNA
tttttcaggatttcagcatc

SEQ ID NO: 815 - RNA, 20 nt, synthetic construct
  misc_feature 1..20: note = Description of Artificial Sequence: Synthetic oligonucleotide
  source 1..20: mol_type = other RNA
ttttttcaggatttcagcat

SEQ ID NO: 816 - RNA, 20 nt, synthetic construct
  misc_feature 1..20: note = Description of Artificial Sequence: Synthetic oligonucleotide
  source 1..20: mol_type = other RNA
gttttttcaggatttcagca

SEQ ID NO: 817 - RNA, 20 nt, synthetic construct
  misc_feature 1..20: note = Description of Artificial Sequence: Synthetic oligonucleotide
  source 1..20: mol_type = other RNA
tgttttttcaggatttcagc

SEQ ID NO: 818 - RNA, 20 nt, synthetic construct
  misc_feature 1..20: note = Description of Artificial Sequence: Synthetic oligonucleotide
  source 1..20: mol_type = other RNA
ctgttttttcaggatttcag

SEQ ID NO: 819 - RNA, 20 nt, synthetic construct
  misc_feature 1..20: note = Description of Artificial Sequence: Synthetic oligonucleotide
  source 1..20: mol_type = other RNA
gctgttttttcaggatttca

SEQ ID NO: 820 - RNA, 20 nt, synthetic construct
  misc_feature 1..20: note = Description of Artificial Sequence: Synthetic oligonucleotide
  source 1..20: mol_type = other RNA
agctgttttttcaggatttc

SEQ ID NO: 821 - RNA, 20 nt, synthetic construct
  misc_feature 1..20: note = Description of Artificial Sequence: Synthetic oligonucleotide
  source 1..20: mol_type = other RNA
gagctgttttttcaggattt

SEQ ID NO: 822 - RNA, 20 nt, synthetic construct
  misc_feature 1..20: note = Description of Artificial Sequence: Synthetic oligonucleotide
  source 1..20: mol_type = other RNA
tgagctgttttttcaggatt

SEQ ID NO: 823 - RNA, 20 nt, synthetic construct
  misc_feature 1..20: note = Description of Artificial Sequence: Synthetic oligonucleotide
  source 1..20: mol_type = other RNA
ttgagctgttttttcaggat

SEQ ID NO: 824 - RNA, 20 nt, synthetic construct
  misc_feature 1..20: note = Description of Artificial Sequence: Synthetic oligonucleotide
  source 1..20: mol_type = other RNA
tttgagctgttttttcagga

SEQ ID NO: 825 - RNA, 20 nt, synthetic construct
  misc_feature 1..20: note = Description of Artificial Sequence: Synthetic oligonucleotide
  source 1..20: mol_type = other RNA
gtttgagctgttttttcagg

SEQ ID NO: 826 - RNA, 20 nt, synthetic construct
  misc_feature 1..20: note = Description of Artificial Sequence: Synthetic oligonucleotide
  source 1..20: mol_type = other RNA
ttgtttgagctgttttttca

SEQ ID NO: 827 - RNA, 20 nt, synthetic construct
  misc_feature 1..20: note = Description of Artificial Sequence: Synthetic oligonucleotide
  source 1..20: mol_type = other RNA
cattgtttgagctgtttttt

SEQ ID NO: 828 - RNA, 20 nt, synthetic construct
  misc_feature 1..20: note = Description of Artificial Sequence: Synthetic oligonucleotide
  source 1..20: mol_type = other RNA
gcattgtttgagctgttttt

SEQ ID NO: 829 - RNA, 20 nt, synthetic construct
  misc_feature 1..20: note = Description of Artificial Sequence: Synthetic oligonucleotide
  source 1..20: mol_type = other RNA
tgcattgtttgagctgtttt

SEQ ID NO: 830 - RNA, 20 nt, synthetic construct
  misc_feature 1..20: note = Description of Artificial Sequence: Synthetic oligonucleotide
  source 1..20: mol_type = other RNA
ctgcattgtttgagctgttt

SEQ ID NO: 831 - RNA, 20 nt, synthetic construct
  misc_feature 1..20: note = Description of Artificial Sequence: Synthetic oligonucleotide
  source 1..20: mol_type = other RNA
tctgcattgtttgagctgtt

SEQ ID NO: 832 - RNA, 20 nt, synthetic construct
  misc_feature 1..20: note = Description of Artificial Sequence: Synthetic oligonucleotide
  source 1..20: mol_type = other RNA
ctctgcattgtttgagctgt

SEQ ID NO: 833 - RNA, 20 nt, synthetic construct
  misc_feature 1..20: note = Description of Artificial Sequence: Synthetic oligonucleotide
  source 1..20: mol_type = other RNA
actctgcattgtttgagctg

SEQ ID NO: 834 - RNA, 20 nt, synthetic construct
  misc_feature 1..20: note = Description of Artificial Sequence: Synthetic oligonucleotide
  source 1..20: mol_type = other RNA
tactctgcattgtttgagct

SEQ ID NO: 835 - RNA, 20 nt, synthetic construct
  misc_feature 1..20: note = Description of Artificial Sequence: Synthetic oligonucleotide
  source 1..20: mol_type = other RNA
ttactctgcattgtttgagc

SEQ ID NO: 836 - RNA, 20 nt, synthetic construct
  misc_feature 1..20: note = Description of Artificial Sequence: Synthetic oligonucleotide
  source 1..20: mol_type = other RNA
cttactctgcattgtttgag

SEQ ID NO: 837 - RNA, 20 nt, synthetic construct
  misc_feature 1..20: note = Description of Artificial Sequence: Synthetic oligonucleotide
  source 1..20: mol_type = other RNA
tcttactctgcattgtttga

SEQ ID NO: 838 - RNA, 20 nt, synthetic construct
  misc_feature 1..20: note = Description of Artificial Sequence: Synthetic oligonucleotide
  source 1..20: mol_type = other RNA
atcttactctgcattgtttg

SEQ ID NO: 839 - RNA, 20 nt, synthetic construct
  misc_feature 1..20: note = Description of Artificial Sequence: Synthetic oligonucleotide
  source 1..20: mol_type = other RNA
aatcttactctgcattgttt

SEQ ID NO: 840 - RNA, 20 nt, synthetic construct
  misc_feature 1..20: note = Description of Artificial Sequence: Synthetic oligonucleotide
  source 1..20: mol_type = other RNA
caaatcttactctgcattgt

SEQ ID NO: 841 - RNA, 20 nt, synthetic construct
  misc_feature 1..20: note = Description of Artificial Sequence: Synthetic oligonucleotide
  source 1..20: mol_type = other RNA
gatacaaatcttactctgca

SEQ ID NO: 842 - RNA, 20 nt, synthetic construct
  modified_base 9: mod_base = OTHER; note = thymine
  modified_base 15: mod_base = OTHER; note = thymine
  misc_feature 1..20: note = Description of Combined DNA/RNA Molecule: Synthetic oligonucleotide
  source 1..20: mol_type = other RNA
gggtcagctgccaatgctag

SEQ ID NO: 843 - RNA, 20 nt, synthetic construct
  modified_base 9: mod_base = OTHER; note = thymine
  modified_base 15: mod_base = OTHER; note = thymine
  misc_feature 1..20: note = Description of Combined DNA/RNA Molecule: Synthetic oligonucleotide
  source 1..20: mol_type = other RNA
gggtcagctgccaatgctag

SEQ ID NO: 844 - RNA, 20 nt, synthetic construct
  modified_base 9: mod_base = OTHER; note = thymine
  modified_base 15: mod_base = OTHER; note = thymine
  misc_feature 1..20: note = Description of Combined DNA/RNA Molecule: Synthetic oligonucleotide
  source 1..20: mol_type = other RNA
gggtcagctgccaatgctag

SEQ ID NO: 845 - RNA, 20 nt, synthetic construct
  modified_base 9: mod_base = OTHER; note = thymine
  modified_base 15: mod_base = OTHER; note = thymine
  misc_feature 1..20: note = Description of Combined DNA/RNA Molecule: Synthetic oligonucleotide
  source 1..20: mol_type = other RNA
gggtcagctgccaatgctag

SEQ ID NO: 846 - RNA, 20 nt, synthetic construct
  modified_base 9: mod_base = OTHER; note = thymine
  modified_base 15: mod_base = OTHER; note = thymine
  modified_base 18: mod_base = OTHER; note = thymine
  misc_feature 1..20: note = Description of Combined DNA/RNA Molecule: Synthetic oligonucleotide
  source 1..20: mol_type = other RNA
gggtcagctgccaatgctag

SEQ ID NO: 847 - RNA, 20 nt, synthetic construct
  modified_base 9: mod_base = OTHER; note = thymine
  modified_base 15: mod_base = OTHER; note = thymine
  modified_base 18: mod_base = OTHER; note = thymine
  misc_feature 1..20: note = Description of Combined DNA/RNA Molecule: Synthetic oligonucleotide
  source 1..20: mol_type = other RNA
gggtcagctgccaatgctag

SEQ ID NO: 848 - RNA, 20 nt, synthetic construct
  modified_base 4: mod_base = OTHER; note = thymine
  modified_base 9: mod_base = OTHER; note = thymine
  modified_base 15: mod_base = OTHER; note = thymine
  misc_feature 1..20: note = Description of Combined DNA/RNA Molecule: Synthetic oligonucleotide
  source 1..20: mol_type = other RNA
gggtcagctgccaatgctag

SEQ ID NO: 849 - RNA, 20 nt, synthetic construct
  modified_base 4: mod_base = OTHER; note = thymine
  modified_base 9: mod_base = OTHER; note = thymine
  modified_base 15: mod_base = OTHER; note = thymine
  misc_feature 1..20: note = Description of Combined DNA/RNA Molecule: Synthetic oligonucleotide
  source 1..20: mol_type = other RNA
gggtcagctgccaatgctag

SEQ ID NO: 850 - RNA, 20 nt, synthetic construct
  modified_base 9: mod_base = OTHER; note = thymine
  modified_base 15: mod_base = OTHER; note = thymine
  misc_feature 1..20: note = Description of Combined DNA/RNA Molecule: Synthetic oligonucleotide
  source 1..20: mol_type = other RNA
gggtcagctgccaatgctag

SEQ ID NO: 851 - RNA, 20 nt, synthetic construct
  modified_base 9: mod_base = OTHER; note = thymine
  modified_base 15: mod_base = OTHER; note = thymine
  misc_feature 1..20: note = Description of Combined DNA/RNA Molecule: Synthetic oligonucleotide
  source 1..20: mol_type = other RNA
gggtcagctgccaatgctag

SEQ ID NO: 852 - DNA, 20 bp, synthetic construct
  misc_feature 1..20: note = Description of Artificial Sequence: Synthetic oligonucleotide
  source 1..20: mol_type = other DNA
gggtcagctgccaatgctag

SEQ ID NO: 853 - DNA, 20 bp, synthetic construct
  misc_feature 1..20: note = Description of Artificial Sequence: Synthetic oligonucleotide
  source 1..20: mol_type = other DNA
gggtcagctgccaatgctag

SEQ ID NO: 854 - RNA, 20 nt, synthetic construct
  modified_base 9: mod_base = OTHER; note = thymine
  modified_base 15: mod_base = OTHER; note = thymine
  misc_feature 1..20: note = Description of Combined DNA/RNA Molecule: Synthetic oligonucleotide
  source 1..20: mol_type = other RNA
gggtcagctgccaatgctag

SEQ ID NO: 855 - RNA, 20 nt, synthetic construct
  modified_base 9: mod_base = OTHER; note = thymine
  modified_base 15: mod_base = OTHER; note = thymine
  misc_feature 1..20: note = Description of Combined DNA/RNA Molecule: Synthetic oligonucleotide
  source 1..20: mol_type = other RNA
gggtcagctgccaatgctag

SEQ ID NO: 856 - RNA, 20 nt, synthetic construct
  modified_base 9: mod_base = OTHER; note = thymine
  modified_base 15: mod_base = OTHER; note = thymine
  misc_feature 1..20: note = Description of Combined DNA/RNA Molecule: Synthetic oligonucleotide
  source 1..20: mol_type = other RNA
gggtcagctgccaatgctag

SEQ ID NO: 857 - RNA, 20 nt, synthetic construct
  modified_base 9: mod_base = OTHER; note = thymine
  modified_base 15: mod_base = OTHER; note = thymine
  misc_feature 1..20: note = Description of Combined DNA/RNA Molecule: Synthetic oligonucleotide
  source 1..20: mol_type = other RNA
gggtcagctgccaatgctag

SEQ ID NO: 858 - RNA, 20 nt, synthetic construct
  modified_base 9: mod_base = OTHER; note = thymine
  modified_base 15: mod_base = OTHER; note = thymine
  misc_feature 1..20: note = Description of Combined DNA/RNA Molecule: Synthetic oligonucleotide
  source 1..20: mol_type = other RNA
gggtcagctgccaatgctag

SEQ ID NO: 859 - RNA, 20 nt, synthetic construct
  modified_base 9: mod_base = OTHER; note = thymine
  modified_base 15: mod_base = OTHER; note = thymine
  misc_feature 1..20: note = Description of Combined DNA/RNA Molecule: Synthetic oligonucleotide
  source 1..20: mol_type = other RNA
gggtcagctgccaatgctag

SEQ ID NO: 860 - RNA, 20 nt, synthetic construct
  modified_base 9: mod_base = OTHER; note = thymine
  modified_base 15: mod_base = OTHER; note = thymine
  misc_feature 1..20: note = Description of Combined DNA/RNA Molecule: Synthetic oligonucleotide
  source 1..20: mol_type = other RNA
gggtcagctgccaatgctag

SEQ ID NO: 861 - RNA, 20 nt, synthetic construct
  modified_base 9: mod_base = OTHER; note = thymine
  modified_base 15: mod_base = OTHER; note = thymine
  misc_feature 1..20: note = Description of Combined DNA/RNA Molecule: Synthetic oligonucleotide
  source 1..20: mol_type = other RNA
gggtcagctgccaatgctag

SEQ ID NO: 862 - RNA, 20 nt, synthetic construct
  modified_base 9: mod_base = OTHER; note = thymine
  modified_base 15: mod_base = OTHER; note = thymine
  misc_feature 1..20: note = Description of Combined DNA/RNA Molecule: Synthetic oligonucleotide
  source 1..20: mol_type = other RNA
gggtcagctgccaatgctag

SEQ ID NO: 863 - RNA, 20 nt, synthetic construct
  modified_base 9: mod_base = OTHER; note = thymine
  modified_base 15: mod_base = OTHER; note = thymine
  misc_feature 1..20: note = Description of Combined DNA/RNA Molecule: Synthetic oligonucleotide
  source 1..20: mol_type = other RNA
gggtcagctgccaatgctag

SEQ ID NO: 864 - RNA, 20 nt, synthetic construct
  modified_base 9: mod_base = OTHER; note = thymine
  modified_base 15: mod_base = OTHER; note = thymine
  misc_feature 1..20: note = Description of Combined DNA/RNA Molecule: Synthetic oligonucleotide
  source 1..20: mol_type = other RNA
gggtcagctgccaatgctag

SEQ ID NO: 865 - RNA, 20 nt, synthetic construct
  modified_base 9: mod_base = OTHER; note = thymine
  modified_base 15: mod_base = OTHER; note = thymine
  misc_feature 1..20: note = Description of Combined DNA/RNA Molecule: Synthetic oligonucleotide
  source 1..20: mol_type = other RNA
gggtcagctgccaatgctag

SEQ ID NO: 866 - RNA, 20 nt, synthetic construct
  modified_base 9: mod_base = OTHER; note = thymine
  modified_base 15: mod_base = OTHER; note = thymine
  misc_feature 1..20: note = Description of Combined DNA/RNA Molecule: Synthetic oligonucleotide
  source 1..20: mol_type = other RNA
gggtcagctgccaatgctag

SEQ ID NO: 867 - RNA, 20 nt, synthetic construct
  modified_base 9: mod_base = OTHER; note = thymine
  modified_base 15: mod_base = OTHER; note = thymine
  misc_feature 1..20: note = Description of Combined DNA/RNA Molecule: Synthetic oligonucleotide
  source 1..20: mol_type = other RNA
gggtcagctgccaatgctag

SEQ ID NO: 868 - RNA, 20 nt, synthetic construct
  modified_base 9: mod_base = OTHER; note = thymine
  modified_base 15: mod_base = OTHER; note = thymine
  misc_feature 1..20: note = Description of Combined DNA/RNA Molecule: Synthetic oligonucleotide
  source 1..20: mol_type = other RNA
gggtcagctgccaatgctag

SEQ ID NO: 869 - RNA, 20 nt, synthetic construct
  modified_base 9: mod_base = OTHER; note = thymine
  modified_base 15: mod_base = OTHER; note = thymine
  misc_feature 1..20: note = Description of Combined DNA/RNA Molecule: Synthetic oligonucleotide
  source 1..20: mol_type = other RNA
gggtcagctgccaatgctag

SEQ ID NO: 870 - RNA, 20 nt, synthetic construct
  modified_base 9: mod_base = OTHER; note = thymine
  modified_base 15: mod_base = OTHER; note = thymine
  misc_feature 1..20: note = Description of Combined DNA/RNA Molecule: Synthetic oligonucleotide
  source 1..20: mol_type = other RNA
gggtcagctgccaatgctag

SEQ ID NO: 871 - RNA, 20 nt, synthetic construct
  modified_base 9: mod_base = OTHER; note = thymine
  modified_base 15: mod_base = OTHER; note = thymine
  misc_feature 1..20: note = Description of Combined DNA/RNA Molecule: Synthetic oligonucleotide
  source 1..20: mol_type = other RNA
gggtcagctgccaatgctag

SEQ ID NO: 872 - RNA, 20 nt, synthetic construct
  modified_base 9: mod_base = OTHER; note = thymine
  modified_base 15: mod_base = OTHER; note = thymine
  misc_feature 1..20: note = Description of Combined DNA/RNA Molecule: Synthetic oligonucleotide
  source 1..20: mol_type = other RNA
gggtcagctgccaatgctag

SEQ ID NO: 873 - RNA, 20 nt, synthetic construct
  modified_base 9: mod_base = OTHER; note = thymine
  modified_base 15: mod_base = OTHER; note = thymine
  misc_feature 1..20: note = Description of Combined DNA/RNA Molecule: Synthetic oligonucleotide
  source 1..20: mol_type = other RNA
gggtcagctgccaatgctag

SEQ ID NO: 874 - RNA, 20 nt, synthetic construct
  modified_base 9: mod_base = OTHER; note = thymine
  modified_base 15: mod_base = OTHER; note = thymine
  misc_feature 1..20: note = Description of Combined DNA/RNA Molecule: Synthetic oligonucleotide
  source 1..20: mol_type = other RNA
gggtcagctgccaatgctag

SEQ ID NO: 875 - RNA, 20 nt, synthetic construct
  modified_base 9: mod_base = OTHER; note = thymine
  modified_base 15: mod_base = OTHER; note = thymine
  misc_feature 1..20: note = Description of Combined DNA/RNA Molecule: Synthetic oligonucleotide
  source 1..20: mol_type = other RNA
gggtcagctgccaatgctag

SEQ ID NO: 876 - RNA, 20 nt, synthetic construct
  modified_base 9: mod_base = OTHER; note = thymine
  modified_base 15: mod_base = OTHER; note = thymine
  misc_feature 1..20: note = Description of Combined DNA/RNA Molecule: Synthetic oligonucleotide
  source 1..20: mol_type = other RNA
gggtcagctgccaatgctag

SEQ ID NO: 877 - RNA, 20 nt, synthetic construct
  modified_base 9: mod_base = OTHER; note = thymine
  modified_base 15: mod_base = OTHER; note = thymine
  misc_feature 1..20: note = Description of Combined DNA/RNA Molecule: Synthetic oligonucleotide
  source 1..20: mol_type = other RNA
gggtcagctgccaatgctag

SEQ ID NO: 878 - RNA, 20 nt, synthetic construct
  modified_base 9: mod_base = OTHER; note = thymine
  modified_base 15: mod_base = OTHER; note = thymine
  misc_feature 1..20: note = Description of Combined DNA/RNA Molecule: Synthetic oligonucleotide
  source 1..20: mol_type = other RNA
gggtcagctgccaatgctag

SEQ ID NO: 879 - RNA, 20 nt, synthetic construct
  modified_base 9: mod_base = OTHER; note = thymine
  modified_base 15: mod_base = OTHER; note = thymine
  misc_feature 1..20: note = Description of Combined DNA/RNA Molecule: Synthetic oligonucleotide
  source 1..20: mol_type = other RNA
gggtcagctgccaatgctag

SEQ ID NO: 880 - RNA, 20 nt, synthetic construct
  modified_base 9: mod_base = OTHER; note = thymine
  modified_base 15: mod_base = OTHER; note = thymine
  misc_feature 1..20: note = Description of Combined DNA/RNA Molecule: Synthetic oligonucleotide
  source 1..20: mol_type = other RNA
gggtcagctgccaatgctag

SEQ ID NO: 881 - RNA, 20 nt, synthetic construct
  modified_base 9: mod_base = OTHER; note = thymine
  modified_base 15: mod_base = OTHER; note = thymine
  misc_feature 1..20: note = Description of Combined DNA/RNA Molecule: Synthetic oligonucleotide
  source 1..20: mol_type = other RNA
gggtcagctgccaatgctag

SEQ ID NO: 882 - RNA, 20 nt, synthetic construct
  misc_feature 1..20: note = Description of Artificial Sequence: Synthetic oligonucleotide
  source 1..20: mol_type = other RNA
ctagcattggcagctgaccc

SEQ ID NO: 883 - DNA, 20 bp, synthetic construct
  misc_feature 1..20: note = Description of Artificial Sequence: Synthetic oligonucleotide
  source 1..20: mol_type = other DNA
gggtcagctgccaatgctag

SEQ ID NO: 884 - RNA, 20 nt, synthetic construct
  modified_base 9: mod_base = OTHER; note = thymine
  modified_base 15: mod_base = OTHER; note = thymine
  misc_feature 1..20: note = Description of Combined DNA/RNA Molecule: Synthetic oligonucleotide
  source 1..20: mol_type = other RNA
gggtcagctgccaatgctag

SEQ ID NO: 885 - RNA, 20 nt, synthetic construct
  modified_base 9: mod_base = OTHER; note = thymine
  modified_base 15: mod_base = OTHER; note = thymine
  misc_feature 1..20: note = Description of Combined DNA/RNA Molecule: Synthetic oligonucleotide
  source 1..20: mol_type = other RNA
gggtcagctgccaatgctag

SEQ ID NO: 886 - DNA, 20 bp, synthetic construct
  misc_feature 1..20: note = Description of Artificial Sequence: Synthetic oligonucleotide
  source 1..20: mol_type = other DNA
gggtcagctgccaatgctag

SEQ ID NO: 887 - DNA, 20 bp, synthetic construct
  misc_feature 1..20: note = Description of Artificial Sequence: Synthetic oligonucleotide
  source 1..20: mol_type = other DNA
gggtcagctgccaatgctag

SEQ ID NO: 888 - DNA, 20 bp, synthetic construct
  misc_feature 1..20: note = Description of Artificial Sequence: Synthetic oligonucleotide
  source 1..20: mol_type = other DNA
gggtcagctgccaatgctag

SEQ ID NO: 889 - DNA, 20 bp, synthetic construct
  misc_feature 1..20: note = Description of Artificial Sequence: Synthetic oligonucleotide
  source 1..20: mol_type = other DNA
gggtcagctgccaatgctag

SEQ ID NO: 890 - DNA, 20 bp, synthetic construct
  misc_feature 1..20: note = Description of Artificial Sequence: Synthetic oligonucleotide
  source 1..20: mol_type = other DNA
gggtcagctgccaatgctag

SEQ ID NO: 891 - DNA, 20 bp, synthetic construct
  misc_feature 1..20: note = Description of Artificial Sequence: Synthetic oligonucleotide
  source 1..20: mol_type = other DNA
gggtcagctgccaatgctag

SEQ ID NO: 892 - DNA, 20 bp, synthetic construct
  misc_feature 1..20: note = Description of Artificial Sequence: Synthetic oligonucleotide
  source 1..20: mol_type = other DNA
gggtcagctgccaatgctag

SEQ ID NO: 893 - DNA, 20 bp, synthetic construct
  misc_feature 1..20: note = Description of Artificial Sequence: Synthetic oligonucleotide
  source 1..20: mol_type = other DNA
gggtcagctgccaatgctag

SEQ ID NO: 894 - DNA, 20 bp, synthetic construct
  misc_feature 1..20: note = Description of Artificial Sequence: Synthetic oligonucleotide
  source 1..20: mol_type = other DNA
gggtcagctgccaatgctag

SEQ ID NO: 895 - DNA, 20 bp, synthetic construct
  misc_feature 1..20: note = Description of Artificial Sequence: Synthetic oligonucleotide
  source 1..20: mol_type = other DNA
gggtcagctgccaatgctag

SEQ ID NO: 896 - DNA, 20 bp, synthetic construct
  misc_feature 1..20: note = Description of Artificial Sequence: Synthetic oligonucleotide
  source 1..20: mol_type = other DNA
gggtcagctgccaatgctag

SEQ ID NO: 897 - DNA, 20 bp, synthetic construct
  misc_feature 1..20: note = Description of Artificial Sequence: Synthetic oligonucleotide
  source 1..20: mol_type = other DNA
gggtcagctgccaatgctag

SEQ ID NO: 898 - DNA, 20 bp, synthetic construct
  misc_feature 1..20: note = Description of Artificial Sequence: Synthetic oligonucleotide
  source 1..20: mol_type = other DNA
gggtcagctgccaatgctag

SEQ ID NO: 899 - DNA, 20 bp, synthetic construct
  misc_feature 1..20: note = Description of Artificial Sequence: Synthetic oligonucleotide
  source 1..20: mol_type = other DNA
gggtcagctgccaatgctag

SEQ ID NO: 900 - DNA, 20 bp, synthetic construct
  misc_feature 1..20: note = Description of Artificial Sequence: Synthetic oligonucleotide
  source 1..20: mol_type = other DNA
gggtcagctgccaatgctag

SEQ ID NO: 901 - DNA, 20 bp, synthetic construct
  misc_feature 1..20: note = Description of Artificial Sequence: Synthetic oligonucleotide
  source 1..20: mol_type = other DNA
gggtcagctgccaatgctag

SEQ ID NO: 902 - DNA, 20 bp, synthetic construct
  misc_feature 1..20: note = Description of Artificial Sequence: Synthetic oligonucleotide
  source 1..20: mol_type = other DNA
gggtcagctgccaatgctag

SEQ ID NO: 903 - DNA, 20 bp, synthetic construct
  misc_feature 1..20: note = Description of Artificial Sequence: Synthetic oligonucleotide
  source 1..20: mol_type = other DNA
gggtcagctgccaatgctag

SEQ ID NO: 904 - DNA, 20 bp, synthetic construct
  misc_feature 1..20: note = Description of Artificial Sequence: Synthetic oligonucleotide
  source 1..20: mol_type = other DNA
gggtcagctgccaatgctag

SEQ ID NO: 905 - DNA, 20 bp, synthetic construct
  misc_feature 1..20: note = Description of Artificial Sequence: Synthetic oligonucleotide
  source 1..20: mol_type = other DNA
gggtcagctgccaatgctag

SEQ ID NO: 906 - DNA, 20 bp, synthetic construct
  misc_feature 1..20: note = Description of Artificial Sequence: Synthetic oligonucleotide
  source 1..20: mol_type = other DNA
gggtcagctgccaatgctag

SEQ ID NO: 907 - DNA, 20 bp, synthetic construct
  misc_feature 1..20: note = Description of Artificial Sequence: Synthetic oligonucleotide
  source 1..20: mol_type = other DNA
gggtcagctgccaatgctag

SEQ ID NO: 908 - RNA, 20 nt, synthetic construct
  modified_base 12: mod_base = OTHER; note = thymine
  misc_feature 1..20: note = Description of Combined DNA/RNA Molecule: Synthetic oligonucleotide
  source 1..20: mol_type = other RNA
tagcgcccacctcacccctc

SEQ ID NO: 909 - RNA, 20 nt, synthetic construct
  modified_base 13: mod_base = OTHER; note = thymine
  misc_feature 1..20: note = Description of Combined DNA/RNA Molecule: Synthetic oligonucleotide
  source 1..20: mol_type = other RNA
ttagcgcccacctcacccct

SEQ ID NO: 910 - RNA, 20 nt, synthetic construct
  modified_base 14: mod_base = OTHER; note = thymine
  misc_feature 1..20: note = Description of Combined DNA/RNA Molecule: Synthetic oligonucleotide
  source 1..20: mol_type = other RNA
cttagcgcccacctcacccc

SEQ ID NO: 911 - DNA, 20 bp, synthetic construct
  misc_feature 1..20: note = Description of Artificial Sequence: Synthetic oligonucleotide
  source 1..20: mol_type = other DNA
accccgtcctggaaaccagg

SEQ ID NO: 912 - DNA, 20 bp, synthetic construct
  misc_feature 1..20: note = Description of Artificial Sequence: Synthetic oligonucleotide
  source 1..20: mol_type = other DNA
ccccgtcctggaaaccagga

SEQ ID NO: 913 - RNA, 20 nt, synthetic construct
  modified_base 15: mod_base = OTHER; note = thymine
  misc_feature 1..20: note = Description of Combined DNA/RNA Molecule: Synthetic oligonucleotide
  source 1..20: mol_type = other RNA
gcttagcgcccacctcaccc

SEQ ID NO: 914 - RNA, 20 nt, synthetic construct
  misc_feature 1..20: note = Description of Artificial Sequence: Synthetic oligonucleotide
  source 1..20: mol_type = other RNA
ggcttagcgcccacctcacc

SEQ ID NO: 915 - RNA, 20 nt, synthetic construct
  modified_base 8: mod_base = OTHER; note = thymine
  misc_feature 1..20: note = Description of Combined DNA/RNA Molecule: Synthetic oligonucleotide
  source 1..20: mol_type = other RNA
cccgtcctggaaaccaggag

SEQ ID NO: 916 - RNA, 20 nt, synthetic construct
  modified_base 10: mod_base = OTHER; note = thymine
  modified_base 13: mod_base = OTHER; note = thymine
  misc_feature 1..20: note = Description of Combined DNA/RNA Molecule: Synthetic oligonucleotide
  source 1..20: mol_type = other RNA
tgaaccccgtcctggaaacc

SEQ ID NO: 917 - RNA, 20 nt, synthetic construct
  modified_base 8: mod_base = OTHER; note = thymine
  modified_base 12: mod_base = OTHER; note = thymine
  modified_base 15: mod_base = OTHER; note = thymine
  misc_feature 1..20: note = Description of Combined DNA/RNA Molecule: Synthetic oligonucleotide
  source 1..20: mol_type = other RNA
tttcccctccctcatcaaca

SEQ ID NO: 918 - RNA, 20 nt, synthetic construct
  modified_base 9: mod_base = OTHER; note = thymine
  modified_base 13: mod_base = OTHER; note = thymine
  misc_feature 1..20: note = Description of Combined DNA/RNA Molecule: Synthetic oligonucleotide
  source 1..20: mol_type = other RNA
agctccagtccctgaaggtg

SEQ ID NO: 919 - RNA, 20 nt, synthetic construct
  modified_base 6: mod_base = OTHER; note = thymine
  misc_feature 1..20: note = Description of Combined DNA/RNA Molecule: Synthetic oligonucleotide
  source 1..20: mol_type = other RNA
aggcttagcgcccacctcac

SEQ ID NO: 920 - RNA, 20 nt, synthetic construct
  modified_base 9: mod_base = OTHER; note = thymine
  modified_base 13: mod_base = OTHER; note = thymine
  misc_feature 1..20: note = Description of Combined DNA/RNA Molecule: Synthetic oligonucleotide
  source 1..20: mol_type = other RNA
gtttcccctccctcatcaac

SEQ ID NO: 921 - DNA, 20 bp, synthetic construct
  misc_feature 1..20: note = Description of Artificial Sequence: Synthetic oligonucleotide
  source 1..20: mol_type = other DNA
aaccccgtcctggaaaccag

SEQ ID NO: 922 - DNA, 20 bp, synthetic construct
  misc_feature 1..20: note = Description of Artificial Sequence: Synthetic oligonucleotide
  source 1..20: mol_type = other DNA
gaaccccgtcctggaaacca

SEQ ID NO: 923 - RNA, 20 nt, synthetic construct
  modified_base 8: mod_base = OTHER; note = thymine
  modified_base 12: mod_base = OTHER; note = thymine
  misc_feature 1..20: note = Description of Combined DNA/RNA Molecule: Synthetic oligonucleotide
  source 1..20: mol_type = other RNA
gctccagtccctgaaggtgt

SEQ ID NO: 924 - RNA, 20 nt, synthetic construct
  modified_base 11: mod_base = OTHER; note = thymine
  modified_base 14: mod_base = OTHER; note = thymine
  misc_feature 1..20: note = Description of Combined DNA/RNA Molecule: Synthetic oligonucleotide
  source 1..20: mol_type = other RNA
ttgaaccccgtcctggaaac

SEQ ID NO: 925 - RNA, 20 nt, synthetic construct
  modified_base 7: mod_base = OTHER; note = thymine
  modified_base 11: mod_base = OTHER; note = thymine
  modified_base 14: mod_base = OTHER; note = thymine
  misc_feature 1..20: note = Description of Combined DNA/RNA Molecule: Synthetic oligonucleotide
  source 1..20: mol_type = other RNA
ttcccctccctcatcaacaa

SEQ ID NO: 926 - RNA, 20 nt, synthetic construct
  modified_base 7: mod_base = OTHER; note = thymine
  misc_feature 1..20: note = Description of Combined DNA/RNA Molecule: Synthetic oligonucleotide
  source 1..20: mol_type = other RNA
ccgtcctggaaaccaggagt

SEQ ID NO: 927 - DNA, 20 bp, synthetic construct
  misc_feature 1..20: note = Description of Artificial Sequence: Synthetic oligonucleotide
  source 1..20: mol_type = other DNA
gcagctccagtccctgaagg

SEQ ID NO: 928 - RNA, 20 nt, synthetic construct
  modified_base 9: mod_base = OTHER; note = thymine
  modified_base 12..13: mod_base = OTHER; note = thymine
  modified_base 15: mod_base = OTHER; note = thymine
  misc_feature 1..20: note = Description of Combined DNA/RNA Molecule: Synthetic oligonucleotide
  source 1..20: mol_type = other RNA
tgccaggctggttatgactc

SEQ ID NO: 929 - RNA, 20 nt, synthetic construct
  modified_base 6: mod_base = OTHER; note = thymine
  misc_feature 1..20: note = Description of Combined DNA/RNA Molecule: Synthetic oligonucleotide
  source 1..20: mol_type = other RNA
cgtcctggaaaccaggagtg

SEQ ID NO: 930 - RNA, 20 nt, synthetic construct
  modified_base 10: mod_base = OTHER; note = thymine
  modified_base 14: mod_base = OTHER; note = thymine
  misc_feature 1..20: note = Description of Combined DNA/RNA Molecule: Synthetic oligonucleotide
  source 1..20: mol_type = other RNA
cagctccagtccctgaaggt

SEQ ID NO: 931 - RNA, 20 nt, synthetic construct
  modified_base 10: mod_base = OTHER; note = thymine
  modified_base 13..14: mod_base = OTHER; note = thymine
  misc_feature 1..20: note = Description of Combined DNA/RNA Molecule: Synthetic oligonucleotide
  source 1..20: mol_type = other RNA
ctgccaggctggttatgact

SEQ ID NO: 932 - RNA, 20 nt, synthetic construct
  misc_feature 1..20: note = Description of Artificial Sequence: Synthetic oligonucleotide
  source 1..20: mol_type = other RNA
tcctggaaaccaggagtgcc

SEQ ID NO: 933 - RNA, 20 nt, synthetic construct
  modified_base 6..7: mod_base = OTHER; note = thymine
  misc_feature 1..20: note = Description of Combined DNA/RNA Molecule: Synthetic oligonucleotide
  source 1..20: mol_type = other RNA
aaggcttagcgcccacctca

SEQ ID NO: 934 - RNA, 20 nt, synthetic construct
  modified_base 7: mod_base = OTHER; note = thymine
  modified_base 10..11: mod_base = OTHER; note = thymine
  modified_base 13: mod_base = OTHER; note = thymine
  misc_feature 1..20: note = Description of Combined DNA/RNA Molecule: Synthetic oligonucleotide
  source 1..20: mol_type = other RNA
ccaggctggttatgactcag

SEQ ID NO: 935 - RNA, 20 nt, synthetic construct
  misc_feature 1..20: note = Description of Artificial Sequence: Synthetic oligonucleotide
  source 1..20: mol_type = other RNA
cctggaaaccaggagtgcca

SEQ ID NO: 936 - RNA, 20 nt, synthetic construct
  modified_base 8: mod_base = OTHER; note = thymine
  modified_base 11..12: mod_base = OTHER; note = thymine
  modified_base 14: mod_base = OTHER; note = thymine
  misc_feature 1..20: note = Description of Combined DNA/RNA Molecule: Synthetic oligonucleotide
  source 1..20: mol_type = other RNA
gccaggctggttatgactca

SEQ ID NO: 937 - RNA, 20 nt, synthetic construct
  modified_base 7..8: mod_base = OTHER; note = thymine
  misc_feature 1..20: note = Description of Combined DNA/RNA Molecule: Synthetic oligonucleotide
  source 1..20: mol_type = other RNA
aaaggcttagcgcccacctc

SEQ ID NO: 938 - RNA, 20 nt, synthetic construct
  modified_base 11..12: mod_base = OTHER; note = thymine
  modified_base 15: mod_base = OTHER; note = thymine
  misc_feature 1..20: note = Description of Combined DNA/RNA Molecule: Synthetic oligonucleotide
  source 1..20: mol_type = other RNA
ggattgggagttacttgcca

SEQ ID NO: 939 - RNA, 20 nt, synthetic construct
  misc_feature 1..20: note = Description of Artificial Sequence: Synthetic oligonucleotide
  source 1..20: mol_type = other RNA
gtcctggaaaccaggagtgc

SEQ ID NO: 940 - RNA, 20 nt, synthetic construct
  modified_base 6: mod_base = OTHER; note = thymine
  modified_base 9..10: mod_base = OTHER; note = thymine
  modified_base 12: mod_base = OTHER; note = thymine
  misc_feature 1..20: note = Description of Combined DNA/RNA Molecule: Synthetic oligonucleotide
  source 1..20: mol_type = other RNA
caggctggttatgactcaga

SEQ ID NO: 941 - RNA, 20 nt, synthetic construct
  modified_base 6..7: mod_base = OTHER; note = thymine
  modified_base 10..11: mod_base = OTHER; note = thymine
  misc_feature 1..20: note = Description of Combined DNA/RNA Molecule: Synthetic oligonucleotide
  source 1..20: mol_type = other RNA
gggagttacttgccaacttg

SEQ ID NO: 942 - RNA, 20 nt, synthetic construct
  modified_base 7..8: mod_base = OTHER; note = thymine
  modified_base 11..12: mod_base = OTHER; note = thymine
  misc_feature 1..20: note = Description of Combined DNA/RNA Molecule: Synthetic oligonucleotide
  source 1..20: mol_type = other RNA
tgggagttacttgccaactt

SEQ ID NO: 943 - RNA, 20 nt, synthetic construct
  modified_base 8..9: mod_base = OTHER; note = thymine
  modified_base 12..13: mod_base = OTHER; note = thymine
  misc_feature 1..20: note = Description of Combined DNA/RNA Molecule: Synthetic oligonucleotide
  source 1..20: mol_type = other RNA
ttgggagttacttgccaact

SEQ ID NO: 944 - RNA, 20 nt, synthetic construct
  modified_base 7: mod_base = OTHER; note = thymine
  modified_base 14: mod_base = OTHER; note = thymine
  misc_feature 1..20: note = Description of Combined DNA/RNA Molecule: Synthetic oligonucleotide
  source 1..20: mol_type = other RNA
atttcctcaacactcagcct

SEQ ID NO: 945 - RNA, 20 nt, synthetic construct
  modified_base 9: mod_base = OTHER; note = thymine
  modified_base 12: mod_base = OTHER; note = thymine
  misc_feature 1..20: note = Description of Combined DNA/RNA Molecule: Synthetic oligonucleotide
  source 1..20: mol_type = other RNA
cccctccctcatcaacaaaa

SEQ ID NO: 946 - RNA, 20 nt, synthetic construct
  modified_base 6: mod_base = OTHER; note = thymine
  modified_base 11..12: mod_base = OTHER; note = thymine
  misc_feature 1..20: note = Description of Combined DNA/RNA Molecule: Synthetic oligonucleotide
  source 1..20: mol_type = other RNA
acatttccacttgccagtta

SEQ ID NO: 947 - RNA, 20 nt, synthetic construct
  modified_base 8..9: mod_base = OTHER; note = thymine
  misc_feature 1..20: note = Description of Combined DNA/RNA Molecule: Synthetic oligonucleotide
  source 1..20: mol_type = other RNA
aaaaggcttagcgcccacct

SEQ ID NO: 948 - RNA, 20 nt, synthetic construct
  modified_base 6: mod_base = OTHER; note = thymine
  modified_base 8: mod_base = OTHER; note = thymine
  misc_feature 1..20: note = Description of Combined DNA/RNA Molecule: Synthetic oligonucleotide
  source 1..20: mol_type = other RNA
acctgtctgaggcaaacgaa

SEQ ID NO: 949 - RNA, 20 nt, synthetic construct
  modified_base 9..10: mod_base = OTHER; note = thymine
  modified_base 13..14: mod_base = OTHER; note = thymine
  misc_feature 1..20: note = Description of Combined DNA/RNA Molecule: Synthetic oligonucleotide
  source 1..20: mol_type = other RNA
attgggagttacttgccaac

SEQ ID NO: 950 - RNA, 20 nt, synthetic construct
  misc_feature 1..20: note = Description of Artificial Sequence: Synthetic oligonucleotide
  source 1..20: mol_type = other RNA
tcaacaaaagcccaccctct

SEQ ID NO: 951 - RNA, 20 nt, synthetic construct
  modified_base 7: mod_base = OTHER; note = thymine
  modified_base 10: mod_base = OTHER; note = thymine
  modified_base 14..15: mod_base = OTHER; note = thymine
  misc_feature 1..20: note = Description of Combined DNA/RNA Molecule: Synthetic oligonucleotide
  source 1..20: mol_type = other RNA
ctaagatgctagcttggcca

SEQ ID NO: 952 - DNA, 20 bp, synthetic construct
  misc_feature 1..20: note = Description of Artificial Sequence: Synthetic oligonucleotide
  source 1..20: mol_type = other DNA
gggtcagctgccaatgctag

SEQ ID NO: 953 - DNA, 20 bp, synthetic construct
  misc_feature 1..20: note = Description of Artificial Sequence: Synthetic oligonucleotide
  source 1..20: mol_type = other DNA
gggtcagctgccaatgctag

SEQ ID NO: 954 - DNA, 20 bp, synthetic construct
  misc_feature 1..20: note = Description of Artificial Sequence: Synthetic oligonucleotide
  source 1..20: mol_type = other DNA
gggtcagctgccaatgctag

SEQ ID NO: 955 - DNA, 20 bp, synthetic construct
  misc_feature 1..20: note = Description of Artificial Sequence: Synthetic oligonucleotide
  source 1..20: mol_type = other DNA
gggtcagctgccaatgctag

SEQ ID NO: 956 - DNA, 20 bp, synthetic construct
  misc_feature 1..20: note = Description of Artificial Sequence: Synthetic oligonucleotide
  source 1..20: mol_type = other DNA
gggtcagctgccaatgctag

SEQ ID NO: 957 - RNA, 20 nt, synthetic construct
  misc_feature 1..20: note = Description of Artificial Sequence: Synthetic oligonucleotide
  source 1..20: mol_type = other RNA
tcaaggaagatggcatttct

SEQ ID NO: 958 - RNA, 20 nt, synthetic construct
  misc_feature 1..20: note = Description of Artificial Sequence: Synthetic oligonucleotide
  source 1..20: mol_type = other RNA
tcaaggaagatggcatttct

SEQ ID NO: 959 - RNA, 20 nt, synthetic construct
  misc_feature 1..20: note = Description of Artificial Sequence: Synthetic oligonucleotide
  source 1..20: mol_type = other RNA
ggccaaacctcggcttacct

SEQ ID NO: 960 - RNA, 30 nt, synthetic construct; identical to SEQ ID NO: 208
  misc_feature 1..30: note = Description of Artificial Sequence: Synthetic oligonucleotide
  source 1..30: mol_type = other RNA

SEQ ID NO: 961 - RNA, 25 nt, synthetic construct
  misc_feature 1..25: note = Description of Artificial Sequence: Synthetic oligonucleotide
  source 1..25: mol_type = other RNA
accagagtaacagtctgagtaggag

SEQ ID NO: 962 - RNA, 25 nt, synthetic construct
  misc_feature 1..25: note = Description of Artificial Sequence: Synthetic oligonucleotide
  source 1..25: mol_type = other RNA
caccagagtaacagtctgagtagga

SEQ ID NO: 963 - RNA, 25 nt, synthetic construct
  misc_feature 1..25: note = Description of Artificial Sequence: Synthetic oligonucleotide
  source 1..25: mol_type = other RNA
tcaccagagtaacagtctgagtagg

SEQ ID NO: 964 - RNA, 25 nt, synthetic construct
  misc_feature 1..25: note = Description of Artificial Sequence: Synthetic oligonucleotide
  source 1..25: mol_type = other RNA
gtcaccagagtaacagtctgagtag

SEQ ID NO: 965 - RNA, 25 nt, synthetic construct
  misc_feature 1..25: note = Description of Artificial Sequence: Synthetic oligonucleotide
  source 1..25: mol_type = other RNA
gttgtgtcaccagagtaacagtctg

SEQ ID NO: 966 - RNA, 25 nt, synthetic construct
  misc_feature 1..25: note = Description of Artificial Sequence: Synthetic oligonucleotide
  source 1..25: mol_type = other RNA
ggttgtgtcaccagagtaacagtct

SEQ ID NO: 967 - RNA, 25 nt, synthetic construct
  misc_feature 1..25: note = Description of Artificial Sequence: Synthetic oligonucleotide
  source 1..25: mol_type = other RNA
aggttgtgtcaccagagtaacagtc

SEQ ID NO: 968 - RNA, 25 nt, synthetic construct
  misc_feature 1..25: note = Description of Artificial Sequence: Synthetic oligonucleotide
  source 1..25: mol_type = other RNA
caggttgtgtcaccagagtaacagt

SEQ ID NO: 969 - RNA, 25 nt, synthetic construct
  misc_feature 1..25: note = Description of Artificial Sequence: Synthetic oligonucleotide
  source 1..25: mol_type = other RNA
acaggttgtgtcaccagagtaacag

SEQ ID NO: 970 - RNA, 25 nt, synthetic construct
  misc_feature 1..25: note = Description of Artificial Sequence: Synthetic oligonucleotide
  source 1..25: mol_type = other RNA
ccacaggttgtgtcaccagagtaac

SEQ ID NO: 971 - RNA, 25 nt, synthetic construct
  misc_feature 1..25: note = Description of Artificial Sequence: Synthetic oligonucleotide
  source 1..25: mol_type = other RNA
accacaggttgtgtcaccagagtaa

SEQ ID NO: 972 - RNA, 25 nt, synthetic construct
  misc_feature 1..25: note = Description of Artificial Sequence: Synthetic oligonucleotide
  source 1..25: mol_type = other RNA
aaccacaggttgtgtcaccagagta

SEQ ID NO: 973 - RNA, 25 nt, synthetic construct
  misc_feature 1..25: note = Description of Artificial Sequence: Synthetic oligonucleotide
  source 1..25: mol_type = other RNA
taaccacaggttgtgtcaccagagt

SEQ ID NO: 974 - RNA, 25 nt, synthetic construct
  misc_feature 1..25: note = Description of Artificial Sequence: Synthetic oligonucleotide
  source 1..25: mol_type = other RNA
gtaaccacaggttgtgtcaccagag

SEQ ID NO: 975 - RNA, 25 nt, synthetic construct
  misc_feature 1..25: note = Description of Artificial Sequence: Synthetic oligonucleotide
  source 1..25: mol_type = other RNA
agtaaccacaggttgtgtcaccaga

SEQ ID NO: 976 - RNA, 25 nt, synthetic construct
  misc_feature 1..25: note = Description of Artificial Sequence: Synthetic oligonucleotide
  source 1..25: mol_type = other RNA
tagtaaccacaggttgtgtcaccag

SEQ ID NO: 977 - RNA, 25 nt, synthetic construct
  misc_feature 1..25: note = Description of Artificial Sequence: Synthetic oligonucleotide
  source 1..25: mol_type = other RNA
ttagtaaccacaggttgtgtcacca

SEQ ID NO: 978 - RNA, 25 nt, synthetic construct
  misc_feature 1..25: note = Description of Artificial Sequence: Synthetic oligonucleotide
  source 1..25: mol_type = other RNA
cttagtaaccacaggttgtgtcacc

SEQ ID NO: 979 - RNA, 25 nt, synthetic construct
  misc_feature 1..25: note = Description of Artificial Sequence: Synthetic oligonucleotide
  source 1..25: mol_type = other RNA
ccttagtaaccacaggttgtgtcac

SEQ ID NO: 980 - RNA, 25 nt, synthetic construct
  misc_feature 1..25: note = Description of Artificial Sequence: Synthetic oligonucleotide
  source 1..25: mol_type = other RNA
tccttagtaaccacaggttgtgtca

SEQ ID NO: 981 - RNA, 25 nt, synthetic construct
  misc_feature 1..25: note = Description of Artificial Sequence: Synthetic oligonucleotide
  source 1..25: mol_type = other RNA
gtttccttagtaaccacaggttgtg

SEQ ID NO: 982 - RNA, 25 nt, synthetic construct
  misc_feature 1..25: note = Description of Artificial Sequence: Synthetic oligonucleotide
  source 1..25: mol_type = other RNA
agtttccttagtaaccacaggttgt

SEQ ID NO: 983 - RNA, 25 nt, synthetic construct
  misc_feature 1..25: note = Description of Artificial Sequence: Synthetic oligonucleotide
  source 1..25: mol_type = other RNA
cagtttccttagtaaccacaggttg

SEQ ID NO: 984 - RNA, 25 nt, synthetic construct
  misc_feature 1..25: note = Description of Artificial Sequence: Synthetic oligonucleotide
  source 1..25: mol_type = other RNA
gcagtttccttagtaaccacaggtt

SEQ ID NO: 985 - RNA, 25 nt, synthetic construct
  misc_feature 1..25: note = Description of Artificial Sequence: Synthetic oligonucleotide
  source 1..25: mol_type = other RNA
ggcagtttccttagtaaccacaggt

SEQ ID NO: 986 - RNA, 25 nt, synthetic construct
  misc_feature 1..25: note = Description of Artificial Sequence: Synthetic oligonucleotide
  source 1..25: mol_type = other RNA
tggcagtttccttagtaaccacagg

SEQ ID NO: 987 - RNA, 25 nt, synthetic construct
  misc_feature 1..25: note = Description of Artificial Sequence: Synthetic oligonucleotide
  source 1..25: mol_type = other RNA
atggcagtttccttagtaaccacag

SEQ ID NO: 988 - RNA, 25 nt, synthetic construct
  misc_feature 1..25: note = Description of Artificial Sequence: Synthetic oligonucleotide
  source 1..25: mol_type = other RNA
agatggcagtttccttagtaaccac

SEQ ID NO: 989 - RNA, 25 nt, synthetic construct
  misc_feature 1..25: note = Description of Artificial Sequence: Synthetic oligonucleotide
  source 1..25: mol_type = other RNA
gagatggcagtttccttagtaacca

SEQ ID NO: 990 - RNA, 25 nt, synthetic construct
  misc_feature 1..25: note = Description of Artificial Sequence: Synthetic oligonucleotide
  source 1..25: mol_type = other RNA
ggagatggcagtttccttagtaacc

SEQ ID NO: 991 - RNA, 25 nt, synthetic construct
  misc_feature 1..25: note = Description of Artificial Sequence: Synthetic oligonucleotide
  source 1..25: mol_type = other RNA
tggagatggcagtttccttagtaac

SEQ ID NO: 992 - RNA, 25 nt, synthetic construct
  misc_feature 1..25: note = Description of Artificial Sequence: Synthetic oligonucleotide
  source 1..25: mol_type = other RNA
ttggagatggcagtttccttagtaa

SEQ ID NO: 993 - RNA, 25 nt, synthetic construct
  misc_feature 1..25: note = Description of Artificial Sequence: Synthetic oligonucleotide
  source 1..25: mol_type = other RNA
tttggagatggcagtttccttagta

SEQ ID NO: 994 - RNA, 25 nt, synthetic construct
  misc_feature 1..25: note = Description of Artificial Sequence: Synthetic oligonucleotide
  source 1..25: mol_type = other RNA
agtttggagatggcagtttccttag

SEQ ID NO: 995 - RNA, 25 nt, synthetic construct
  misc_feature 1..25: note = Description of Artificial Sequence: Synthetic oligonucleotide
  source 1..25: mol_type = other RNA
tagtttggagatggcagtttcctta

SEQ ID NO: 996 - RNA, 25 nt, synthetic construct
  misc_feature 1..25: note = Description of Artificial Sequence: Synthetic oligonucleotide
  source 1..25: mol_type = other RNA
ctagtttggagatggcagtttcctt

SEQ ID NO: 997 - RNA, 25 nt, synthetic construct
  misc_feature 1..25: note = Description of Artificial Sequence: Synthetic oligonucleotide
  source 1..25: mol_type = other RNA
tctagtttggagatggcagtttcct

SEQ ID NO: 998 - RNA, 25 nt, synthetic construct
  misc_feature 1..25: note = Description of Artificial Sequence: Synthetic oligonucleotide
  source 1..25: mol_type = other RNA
ttctagtttggagatggcagtttcc

SEQ ID NO: 999 - RNA, 25 nt, synthetic construct
  misc_feature 1..25: note = Description of Artificial Sequence: Synthetic oligonucleotide
  source 1..25: mol_type = other RNA
catttctagtttggagatggcagtt

SEQ ID NO: 1000 - RNA, 25 nt, synthetic construct
  misc_feature 1..25: note = Description of Artificial Sequence: Synthetic oligonucleotide
  source 1..25: mol_type = other RNA
gcatttctagtttggagatggcagt

SEQ ID NO: 1001 - RNA, 25 nt, synthetic construct
  misc_feature 1..25: note = Description of Artificial Sequence: Synthetic oligonucleotide
  source 1..25: mol_type = other RNA
atggcatttctagtttggagatggc

SEQ ID NO: 1002 - RNA, 25 nt, synthetic construct
  misc_feature 1..25: note = Description of Artificial Sequence: Synthetic oligonucleotide
  source 1..25: mol_type = other RNA
gaagatggcatttctagtttggaga

SEQ ID NO: 1003 - RNA, 25 nt, synthetic construct
  misc_feature 1..25: note = Description of Artificial Sequence: Synthetic oligonucleotide
  source 1..25: mol_type = other RNA
aggaagatggcatttctagtttgga

SEQ ID NO: 1004 - RNA, 25 nt, synthetic construct
  misc_feature 1..25: note = Description of Artificial Sequence: Synthetic oligonucleotide
  source 1..25: mol_type = other RNA
aaggaagatggcatttctagtttgg

SEQ ID NO: 1005 - RNA, 25 nt, synthetic construct
  misc_feature 1..25: note = Description of Artificial Sequence: Synthetic oligonucleotide
  source 1..25: mol_type = other RNA
caaggaagatggcatttctagtttg

SEQ ID NO: 1006 - RNA, 25 nt, synthetic construct
  misc_feature 1..25: note = Description of Artificial Sequence: Synthetic oligonucleotide
  source 1..25: mol_type = other RNA
catcaaggaagatggcatttctagt

SEQ ID NO: 1007 - RNA, 25 nt, synthetic construct
  misc_feature 1..25: note = Description of Artificial Sequence: Synthetic oligonucleotide
  source 1..25: mol_type = other RNA
acatcaaggaagatggcatttctag

SEQ ID NO: 1008 - RNA, 25 nt, synthetic construct
  misc_feature 1..25: note = Description of Artificial Sequence: Synthetic oligonucleotide
  source 1..25: mol_type = other RNA
aacatcaaggaagatggcatttcta

SEQ ID NO: 1009 - RNA, 25 nt, synthetic construct
  misc_feature 1..25: note = Description of Artificial Sequence: Synthetic oligonucleotide
  source 1..25: mol_type = other RNA
caacatcaaggaagatggcatttct

SEQ ID NO: 1010 - RNA, 25 nt, synthetic construct
  misc_feature 1..25: note = Description of Artificial Sequence: Synthetic oligonucleotide
  source 1..25: mol_type = other RNA
ctccaacatcaaggaagatggcatt

SEQ ID NO: 1011 - RNA, 25 nt, synthetic construct
  misc_feature 1..25: note = Description of Artificial Sequence: Synthetic oligonucleotide
  source 1..25: mol_type = other RNA
acctccaacatcaaggaagatggca

SEQ ID NO: 1012 - RNA, 25 nt, synthetic construct
  misc_feature 1..25: note = Description of Artificial Sequence: Synthetic oligonucleotide
  source 1..25: mol_type = other RNA
gtacctccaacatcaaggaagatgg

SEQ ID NO: 1013 - RNA, 25 nt, synthetic construct
  misc_feature 1..25: note = Description of Artificial Sequence: Synthetic oligonucleotide
  source 1..25: mol_type = other RNA
aggtacctccaacatcaaggaagat

SEQ ID NO: 1014 - RNA, 25 nt, synthetic construct
  misc_feature 1..25: note = Description of Artificial Sequence: Synthetic oligonucleotide
  source 1..25: mol_type = other RNA
agagcaggtacctccaacatcaagg

SEQ ID NO: 1015 - RNA, 25 nt, synthetic construct
  misc_feature 1..25: note = Description of Artificial Sequence: Synthetic oligonucleotide
  source 1..25: mol_type = other RNA
cagagcaggtacctccaacatcaag

SEQ ID NO: 1016 - RNA, 25 nt, synthetic construct
  misc_feature 1..25: note = Description of Artificial Sequence: Synthetic oligonucleotide
  source 1..25: mol_type = other RNA
ctgccagagcaggtacctccaacat

SEQ ID NO: 1017 - RNA, 25 nt, synthetic construct
  misc_feature 1..25: note = Description of Artificial Sequence: Synthetic oligonucleotide
  source 1..25: mol_type = other RNA
tctgccagagcaggtacctccaaca

SEQ ID NO: 1018 - RNA, 25 nt, synthetic construct
  misc_feature 1..25: note = Description of Artificial Sequence: Synthetic oligonucleotide
  source 1..25: mol_type = other RNA
atctgccagagcaggtacctccaac

SEQ ID NO: 1019 - RNA, 25 nt, synthetic construct
  misc_feature 1..25: note = Description of Artificial Sequence: Synthetic oligonucleotide
  source 1..25: mol_type = other RNA
aatctgccagagcaggtacctccaa

SEQ ID NO: 1020 - RNA, 25 nt, synthetic construct
  misc_feature 1..25: note = Description of Artificial Sequence: Synthetic oligonucleotide
  source 1..25: mol_type = other RNA
aaatctgccagagcaggtacctcca

SEQ ID NO: 1021 - RNA, 25 nt, synthetic construct
  misc_feature 1..25: note = Description of Artificial Sequence: Synthetic oligonucleotide
  source 1..25: mol_type = other RNA
gaaatctgccagagcaggtacctcc

SEQ ID NO: 1022 - RNA, 25 nt, synthetic construct
  misc_feature 1..25: note = Description of Artificial Sequence: Synthetic oligonucleotide
  source 1..25: mol_type = other RNA
tgaaatctgccagagcaggtacctc

SEQ ID NO: 1023 - RNA, 25 nt, synthetic construct
  misc_feature 1..25: note = Description of Artificial Sequence: Synthetic oligonucleotide
  source 1..25: mol_type = other RNA
ttgaaatctgccagagcaggtacct

SEQ ID NO: 1024 - RNA, 25 nt, synthetic construct
  misc_feature 1..25: note = Description of Artificial Sequence: Synthetic oligonucleotide
  source 1..25: mol_type = other RNA
cccggttgaaatctgccagagcagg

SEQ ID NO: 1025 - RNA, 25 nt, synthetic construct
  misc_feature 1..25: note = Description of Artificial Sequence: Synthetic oligonucleotide
  source 1..25: mol_type = other RNA
ccaagcccggttgaaatctgccaga

SEQ ID NO: 1026 - RNA, 25 nt, synthetic construct
  misc_feature 1..25: note = Description of Artificial Sequence: Synthetic oligonucleotide
  source 1..25: mol_type = other RNA
tccaagcccggttgaaatctgccag

SEQ ID NO: 1027 - RNA, 25 nt, synthetic construct
  misc_feature 1..25: note = Description of Artificial Sequence: Synthetic oligonucleotide
  source 1..25: mol_type = other RNA
gtccaagcccggttgaaatctgcca

SEQ ID NO: 1028 - RNA, 25 nt, synthetic construct
  misc_feature 1..25: note = Description of Artificial Sequence: Synthetic oligonucleotide
  source 1..25: mol_type = other RNA
tctgtccaagcccggttgaaatctg

SEQ ID NO: 1029 - RNA, 25 nt, synthetic construct
  misc_feature 1..25: note = Description of Artificial Sequence: Synthetic oligonucleotide
  source 1..25: mol_type = other RNA
ttctgtccaagcccggttgaaatct

SEQ ID NO: 1030 - RNA, 25 nt, synthetic construct
  misc_feature 1..25: note = Description of Artificial Sequence: Synthetic oligonucleotide
  source 1..25: mol_type = other RNA
gttctgtccaagcccggttgaaatc

SEQ ID NO: 1031 - RNA, 25 nt, synthetic construct
  misc_feature 1..25: note = Description of Artificial Sequence: Synthetic oligonucleotide
  source 1..25: mol_type = other RNA
agttctgtccaagcccggttgaaat

SEQ ID NO: 1032 - RNA, 25 nt, synthetic construct
  misc_feature 1..25: note = Description of Artificial Sequence: Synthetic oligonucleotide
  source 1..25: mol_type = other RNA
aagttctgtccaagcccggttgaaa

SEQ ID NO: 1033 - RNA, 25 nt, synthetic construct
  misc_feature 1..25: note = Description of Artificial Sequence: Synthetic oligonucleotide
  source 1..25: mol_type = other RNA
taagttctgtccaagcccggttgaa

SEQ ID NO: 1034 - RNA, 25 nt, synthetic construct
  misc_feature 1..25: note = Description of Artificial Sequence: Synthetic oligonucleotide
  source 1..25: mol_type = other RNA
gtaagttctgtccaagcccggttga

SEQ ID NO: 1035 - RNA, 25 nt, synthetic construct
  misc_feature 1..25: note = Description of Artificial Sequence: Synthetic oligonucleotide
  source 1..25: mol_type = other RNA
ggtaagttctgtccaagcccggttg

SEQ ID NO: 1036 - RNA, 25 nt, synthetic construct
  misc_feature 1..25: note = Description of Artificial Sequence: Synthetic oligonucleotide
  source 1..25: mol_type = other RNA
cggtaagttctgtccaagcccggtt

SEQ ID NO: 1037 - RNA, 25 nt, synthetic construct
  misc_feature 1..25: note = Description of Artificial Sequence: Synthetic oligonucleotide
  source 1..25: mol_type = other RNA
tcggtaagttctgtccaagcccggt

SEQ ID NO: 1038 - RNA, 25 nt, synthetic construct
  misc_feature 1..25: note = Description of Artificial Sequence: Synthetic oligonucleotide
  source 1..25: mol_type = other RNA
gtcggtaagttctgtccaagcccgg

SEQ ID NO: 1039 - RNA, 25 nt, synthetic construct
  misc_feature 1..25: note = Description of Artificial Sequence: Synthetic oligonucleotide
  source 1..25: mol_type = other RNA
agtcggtaagttctgtccaagcccg

SEQ ID NO: 1040 - RNA, 25 nt, synthetic construct
  misc_feature 1..25: note = Description of Artificial Sequence: Synthetic oligonucleotide
  source 1..25: mol_type = other RNA
cagtcggtaagttctgtccaagccc

SEQ ID NO: 1041 - RNA, 25 nt, synthetic construct
  misc_feature 1..25: note = Description of Artificial Sequence: Synthetic oligonucleotide
  source 1..25: mol_type = other RNA
aaagccagtcggtaagttctgtcca

SEQ ID NO: 1042 - RNA, 25 nt, synthetic construct
  misc_feature 1..25: note = Description of Artificial Sequence: Synthetic oligonucleotide
  source 1..25: mol_type = other RNA
gaaagccagtcggtaagttctgtcc

SEQ ID NO: 1043 - RNA, 25 nt, synthetic construct
  misc_feature 1..25: note = Description of Artificial Sequence: Synthetic oligonucleotide
  source 1..25: mol_type = other RNA
gtcacccaccatcaccctctgtgat

SEQ ID NO: 1044 - RNA, 25 nt, synthetic construct
  misc_feature 1..25: note = Description of Artificial Sequence: Synthetic oligonucleotide
  source 1..25: mol_type = other RNA
ggtcacccaccatcaccctctgtga

SEQ ID NO: 1045 - RNA, 25 nt, synthetic construct
  misc_feature 1..25: note = Description of Artificial Sequence: Synthetic oligonucleotide
  source 1..25: mol_type = other RNA
aaggtcacccaccatcaccctctgt

SEQ ID NO: 1046 - RNA, 25 nt, synthetic construct
  misc_feature 1..25: note = Description of Artificial Sequence: Synthetic oligonucleotide
  source 1..25: mol_type = other RNA
caaggtcacccaccatcaccctctg

SEQ ID NO: 1047 - RNA, 25 nt, synthetic construct
  misc_feature 1..25: note = Description of Artificial Sequence: Synthetic oligonucleotide
  source 1..25: mol_type = other RNA
tcaaggtcacccaccatcaccctct

SEQ ID NO: 1048 - RNA, 25 nt, synthetic construct
  misc_feature 1..25: note = Description of Artificial Sequence: Synthetic oligonucleotide
  source 1..25: mol_type = other RNA
ctcaaggtcacccaccatcaccctc

SEQ ID NO: 1049 - RNA, 25 nt, synthetic construct
  misc_feature 1..25: note = Description of Artificial Sequence: Synthetic oligonucleotide
  source 1..25: mol_type = other RNA
cttgatcaagcagagaaagccagtc

SEQ ID NO: 1050 - RNA, 25 nt, synthetic construct
  misc_feature 1..25: note = Description of Artificial Sequence: Synthetic oligonucleotide
  source 1..25: mol_type = other RNA
ataacttgatcaagcagagaaagcc

SEQ ID NO: 1051 - RNA, 20 nt, synthetic construct
  misc_feature 1..20: note = Description of Artificial Sequence: Synthetic oligonucleotide
  source 1..20: mol_type = other RNA
agtaacagtctgagtaggag

SEQ ID NO: 1052 - RNA, 20 nt, synthetic construct
  misc_feature 1..20: note = Description of Artificial Sequence: Synthetic oligonucleotide
  source 1..20: mol_type = other RNA
gagtaacagtctgagtagga

SEQ ID NO: 1053 - RNA, 20 nt, synthetic construct
  misc_feature 1..20: note = Description of Artificial Sequence: Synthetic oligonucleotide
  source 1..20: mol_type = other RNA
agagtaacagtctgagtagg

SEQ ID NO: 1054 - RNA, 20 nt, synthetic construct
  misc_feature 1..20: note = Description of Artificial Sequence: Synthetic oligonucleotide
  source 1..20: mol_type = other RNA
cagagtaacagtctgagtag

SEQ ID NO: 1055 - RNA, 20 nt, synthetic construct
  misc_feature 1..20: note = Description of Artificial Sequence: Synthetic oligonucleotide
  source 1..20: mol_type = other RNA
gtcaccagagtaacagtctg

SEQ ID NO: 1056 - RNA, 20 nt, synthetic construct
  misc_feature 1..20: note = Description of Artificial Sequence: Synthetic oligonucleotide
  source 1..20: mol_type = other RNA
tgtcaccagagtaacagtct

SEQ ID NO: 1057 - RNA, 20 nt, synthetic construct
  misc_feature 1..20: note = Description of Artificial Sequence: Synthetic oligonucleotide
  source 1..20: mol_type = other RNA
gtgtcaccagagtaacagtc

SEQ ID NO: 1058 - RNA, 20 nt, synthetic construct
  misc_feature 1..20: note = Description of Artificial Sequence: Synthetic oligonucleotide
  source 1..20: mol_type = other RNA
tgtgtcaccagagtaacagt

SEQ ID NO: 1059 - RNA, 20 nt, synthetic construct
  misc_feature 1..20: note = Description of Artificial Sequence: Synthetic oligonucleotide
  source 1..20: mol_type = other RNA
ttgtgtcaccagagtaacag

SEQ ID NO: 1060 - RNA, 20 nt, synthetic construct
  misc_feature 1..20: note = Description of Artificial Sequence: Synthetic oligonucleotide
  source 1..20: mol_type = other RNA
ggttgtgtcaccagagtaac

SEQ ID NO: 1061 - RNA, 20 nt, synthetic construct
  misc_feature 1..20: note = Description of Artificial Sequence: Synthetic oligonucleotide
  source 1..20: mol_type = other RNA
aggttgtgtcaccagagtaa

SEQ ID NO: 1062 - RNA, 20 nt, synthetic construct
  misc_feature 1..20: note = Description of Artificial Sequence: Synthetic oligonucleotide
  source 1..20: mol_type = other RNA
caggttgtgtcaccagagta

SEQ ID NO: 1063 - RNA, 20 nt, synthetic construct
  misc_feature 1..20: note = Description of Artificial Sequence: Synthetic oligonucleotide
  source 1..20: mol_type = other RNA
acaggttgtgtcaccagagt

SEQ ID NO: 1064 - RNA, 20 nt, synthetic construct
  misc_feature 1..20: note = Description of Artificial Sequence: Synthetic oligonucleotide
  source 1..20: mol_type = other RNA
cacaggttgtgtcaccagag

SEQ ID NO: 1065 - RNA, 20 nt, synthetic construct
  misc_feature 1..20: note = Description of Artificial Sequence: Synthetic oligonucleotide
  source 1..20: mol_type = other RNA
ccacaggttgtgtcaccaga

SEQ ID NO: 1066 - RNA, 20 nt, synthetic construct
  misc_feature 1..20: note = Description of Artificial Sequence: Synthetic oligonucleotide
  source 1..20: mol_type = other RNA
accacaggttgtgtcaccag

SEQ ID NO: 1067 - RNA, 20 nt, synthetic construct
  misc_feature 1..20: note = Description of Artificial Sequence: Synthetic oligonucleotide
  source 1..20: mol_type = other RNA
aaccacaggttgtgtcacca

SEQ ID NO: 1068 - RNA, 20 nt, synthetic construct
  misc_feature 1..20: note = Description of Artificial Sequence: Synthetic oligonucleotide
  source 1..20: mol_type = other RNA
taaccacaggttgtgtcacc

SEQ ID NO: 1069 - RNA, 20 nt, synthetic construct
  misc_feature 1..20: note = Description of Artificial Sequence: Synthetic oligonucleotide
  source 1..20: mol_type = other RNA
gtaaccacaggttgtgtcac

SEQ ID NO: 1070 - RNA, 20 nt, synthetic construct
  misc_feature 1..20: note = Description of Artificial Sequence: Synthetic oligonucleotide
  source 1..20: mol_type = other RNA
agtaaccacaggttgtgtca

SEQ ID NO: 1071 - RNA, 20 nt, synthetic construct
  misc_feature 1..20: note = Description of Artificial Sequence: Synthetic oligonucleotide
  source 1..20: mol_type = other RNA
cttagtaaccacaggttgtg

SEQ ID NO: 1072 - RNA, 20 nt, synthetic construct
  misc_feature 1..20: note = Description of Artificial Sequence: Synthetic oligonucleotide
  source 1..20: mol_type = other RNA
ccttagtaaccacaggttgt

SEQ ID NO: 1073 - RNA, 20 nt, synthetic construct
  misc_feature 1..20: note = Description of Artificial Sequence: Synthetic oligonucleotide
  source 1..20: mol_type = other RNA
tccttagtaaccacaggttg

SEQ ID NO: 1074 - RNA, 20 nt, synthetic construct
  misc_feature 1..20: note = Description of Artificial Sequence: Synthetic oligonucleotide
  source 1..20: mol_type = other RNA
ttccttagtaaccacaggtt

SEQ ID NO: 1075 - RNA, 20 nt, synthetic construct
  misc_feature 1..20: note = Description of Artificial Sequence: Synthetic oligonucleotide
  source 1..20: mol_type = other RNA
tttccttagtaaccacaggt

SEQ ID NO: 1076 - RNA, 20 nt, synthetic construct
  misc_feature 1..20: note = Description of Artificial Sequence: Synthetic oligonucleotide
  source 1..20: mol_type = other RNA
gtttccttagtaaccacagg

SEQ ID NO: 1077 - RNA, 20 nt, synthetic construct
  misc_feature 1..20: note = Description of Artificial Sequence: Synthetic oligonucleotide
  source 1..20: mol_type = other RNA
agtttccttagtaaccacag

SEQ ID NO: 1078 - RNA, 20 nt, synthetic construct
  misc_feature 1..20: note = Description of Artificial Sequence: Synthetic oligonucleotide
  source 1..20: mol_type = other RNA
gcagtttccttagtaaccac

SEQ ID NO: 1079 - RNA, 20 nt, synthetic construct
  misc_feature 1..20: note = Description of Artificial Sequence: Synthetic oligonucleotide
  source 1..20: mol_type = other RNA
ggcagtttccttagtaacca

SEQ ID NO: 1080 - RNA, 20 nt, synthetic construct
  misc_feature 1..20: note = Description of Artificial Sequence: Synthetic oligonucleotide
  source 1..20: mol_type = other RNA
tggcagtttccttagtaacc

SEQ ID NO: 1081 - RNA, 20 nt, synthetic construct
  misc_feature 1..20: note = Description of Artificial Sequence: Synthetic oligonucleotide
  source 1..20: mol_type = other RNA
atggcagtttccttagtaac

SEQ ID NO: 1082 - RNA, 20 nt, synthetic construct
  misc_feature 1..20: note = Description of Artificial Sequence: Synthetic oligonucleotide
  source 1..20: mol_type = other RNA
gatggcagtttccttagtaa

SEQ ID NO: 1083 - RNA, 20 nt, synthetic construct
  misc_feature 1..20: note = Description of Artificial Sequence: Synthetic oligonucleotide
  source 1..20: mol_type = other RNA
agatggcagtttccttagta

SEQ ID NO: 1084 - RNA, 20 nt, synthetic construct
  misc_feature 1..20: note = Description of Artificial Sequence: Synthetic oligonucleotide
  source 1..20: mol_type = other RNA
ggagatggcagtttccttag

SEQ ID NO: 1085 - RNA, 20 nt, synthetic construct
  misc_feature 1..20: note = Description of Artificial Sequence: Synthetic oligonucleotide
  source 1..20: mol_type = other RNA
tggagatggcagtttcctta

SEQ ID NO: 1086 - RNA, 20 nt, synthetic construct
  misc_feature 1..20: note = Description of Artificial Sequence: Synthetic oligonucleotide
  source 1..20: mol_type = other RNA
ttggagatggcagtttcctt

SEQ ID NO: 1087 - RNA, 20 nt, synthetic construct
  misc_feature 1..20: note = Description of Artificial Sequence: Synthetic oligonucleotide
  source 1..20: mol_type = other RNA
tttggagatggcagtttcct

SEQ ID NO: 1088 - RNA, 20 nt, synthetic construct
  misc_feature 1..20: note = Description of Artificial Sequence: Synthetic oligonucleotide
  source 1..20: mol_type = other RNA
gtttggagatggcagtttcc

SEQ ID NO: 1089 - RNA, 20 nt, synthetic construct
  misc_feature 1..20: note = Description of Artificial Sequence: Synthetic oligonucleotide
  source 1..20: mol_type = other RNA
ctagtttggagatggcagtt

SEQ ID NO: 1090 - RNA, 20 nt, synthetic construct
  misc_feature 1..20: note = Description of Artificial Sequence: Synthetic oligonucleotide
  source 1..20: mol_type = other RNA
tctagtttggagatggcagt

SEQ ID NO: 1091 - RNA, 20 nt, synthetic construct
  misc_feature 1..20: note = Description of Artificial Sequence: Synthetic oligonucleotide
  source 1..20: mol_type = other RNA
atttctagtttggagatggc

SEQ ID NO: 1092 - RNA, 20 nt, synthetic construct
  misc_feature 1..20: note = Description of Artificial Sequence: Synthetic oligonucleotide
  source 1..20: mol_type = other RNA
tggcatttctagtttggaga

SEQ ID NO: 1093 - RNA, 20 nt, synthetic construct
  misc_feature 1..20: note = Description of Artificial Sequence: Synthetic oligonucleotide
  source 1..20: mol_type = other RNA
gatggcatttctagtttgga

SEQ ID NO: 1094 - RNA, 20 nt, synthetic construct
  misc_feature 1..20: note = Description of Artificial Sequence: Synthetic oligonucleotide
  source 1..20: mol_type = other RNA
agatggcatttctagtttgg

SEQ ID NO: 1095 - RNA, 20 nt, synthetic construct
  misc_feature 1..20: note = Description of Artificial Sequence: Synthetic oligonucleotide
  source 1..20: mol_type = other RNA
aagatggcatttctagtttg

SEQ ID NO: 1096 - RNA, 20 nt, synthetic construct
  misc_feature 1..20: note = Description of Artificial Sequence: Synthetic oligonucleotide
  source 1..20: mol_type = other RNA
aggaagatggcatttctagt

SEQ ID NO: 1097 - RNA, 20 nt, synthetic construct
  misc_feature 1..20: note = Description of Artificial Sequence: Synthetic oligonucleotide
  source 1..20: mol_type = other RNA
aaggaagatggcatttctag

SEQ ID NO: 1098 - RNA, 20 nt, synthetic construct
  misc_feature 1..20: note = Description of Artificial Sequence: Synthetic oligonucleotide
  source 1..20: mol_type = other RNA
caaggaagatggcatttcta

SEQ ID NO: 1099 - RNA, 20 nt, synthetic construct
  misc_feature 1..20: note = Description of Artificial Sequence: Synthetic oligonucleotide
  source 1..20: mol_type = other RNA
tcaaggaagatggcatttct

SEQ ID NO: 1100 - RNA, 20 nt, synthetic construct
  misc_feature 1..20: note = Description of Artificial Sequence: Synthetic oligonucleotide
  source 1..20: mol_type = other RNA
acatcaaggaagatggcatt

SEQ ID NO: 1101 - RNA, 20 nt, synthetic construct
  misc_feature 1..20: note = Description of Artificial Sequence: Synthetic oligonucleotide
  source 1..20: mol_type = other RNA
caacatcaaggaagatggca

SEQ ID NO: 1102 - RNA, 20 nt, synthetic construct
  misc_feature 1..20: note = Description of Artificial Sequence: Synthetic oligonucleotide
  source 1..20: mol_type = other RNA
tccaacatcaaggaagatgg

SEQ ID NO: 1103 - RNA, 20 nt, synthetic construct
  misc_feature 1..20: note = Description of Artificial Sequence: Synthetic oligonucleotide
  source 1..20: mol_type = other RNA
cctccaacatcaaggaagat

SEQ ID NO: 1104 - RNA, 20 nt, synthetic construct
  misc_feature 1..20: note = Description of Artificial Sequence: Synthetic oligonucleotide
  source 1..20: mol_type = other RNA
aggtacctccaacatcaagg

SEQ ID NO: 1105 - RNA, 20 nt, synthetic construct
  misc_feature 1..20: note = Description of Artificial Sequence: Synthetic oligonucleotide
  source 1..20: mol_type = other RNA
caggtacctccaacatcaag

SEQ ID NO: 1106 - RNA, 20 nt, synthetic construct
  misc_feature 1..20: note = Description of Artificial Sequence: Synthetic oligonucleotide
  source 1..20: mol_type = other RNA
agagcaggtacctccaacat

SEQ ID NO: 1107 - RNA, 20 nt, synthetic construct
  misc_feature 1..20: note = Description of Artificial Sequence: Synthetic oligonucleotide
  source 1..20: mol_type = other RNA
cagagcaggtacctccaaca

SEQ ID NO: 1108 - RNA, 20 nt, synthetic construct
  misc_feature 1..20: note = Description of Artificial Sequence: Synthetic oligonucleotide
  source 1..20: mol_type = other RNA
ccagagcaggtacctccaac

SEQ ID NO: 1109 - RNA, 20 nt, synthetic construct
  misc_feature 1..20: note = Description of Artificial Sequence: Synthetic oligonucleotide
  source 1..20: mol_type = other RNA
gccagagcaggtacctccaa

SEQ ID NO: 1110 - RNA, 20 nt, synthetic construct
  misc_feature 1..20: note = Description of Artificial Sequence: Synthetic oligonucleotide
  source 1..20: mol_type = other RNA
tgccagagcaggtacctcca

SEQ ID NO: 1111 - RNA, 20 nt, synthetic construct
  misc_feature 1..20: note = Description of Artificial Sequence: Synthetic oligonucleotide
  source 1..20: mol_type = other RNA
ctgccagagcaggtacctcc

SEQ ID NO: 1112 - RNA, 20 nt, synthetic construct
  misc_feature 1..20: note = Description of Artificial Sequence: Synthetic oligonucleotide
  source 1..20: mol_type = other RNA
tctgccagagcaggtacctc

SEQ ID NO: 1113 - RNA, 20 nt, synthetic construct
  misc_feature 1..20: note = Description of Artificial Sequence: Synthetic oligonucleotide
  source 1..20: mol_type = other RNA
atctgccagagcaggtacct

SEQ ID NO: 1114 - RNA, 20 nt, synthetic construct
  misc_feature 1..20: note = Description of Artificial Sequence: Synthetic oligonucleotide
  source 1..20: mol_type = other RNA
ttgaaatctgccagagcagg

SEQ ID NO: 1115 - RNA, 20 nt, synthetic construct
  misc_feature 1..20: note = Description of Artificial Sequence: Synthetic oligonucleotide
  source 1..20: mol_type = other RNA
cccggttgaaatctgccaga

SEQ ID NO: 1116 - RNA, 20 nt, synthetic construct
  misc_feature 1..20: note = Description of Artificial Sequence: Synthetic oligonucleotide
  source 1..20: mol_type = other RNA
gcccggttgaaatctgccag

SEQ ID NO: 1117 - RNA, 20 nt, synthetic construct
  misc_feature 1..20: note = Description of Artificial Sequence: Synthetic oligonucleotide
  source 1..20: mol_type = other RNA
agcccggttgaaatctgcca

SEQ ID NO: 1118 - RNA, 20 nt, synthetic construct
  misc_feature 1..20: note = Description of Artificial Sequence: Synthetic oligonucleotide
  source 1..20: mol_type = other RNA
ccaagcccggttgaaatctg

SEQ ID NO: 1119 - RNA, 20 nt, synthetic construct
  misc_feature 1..20: note = Description of Artificial Sequence: Synthetic oligonucleotide
  source 1..20: mol_type = other RNA
tccaagcccggttgaaatct

SEQ ID NO: 1120 - RNA, 20 nt, synthetic construct
  misc_feature 1..20: note = Description of Artificial Sequence: Synthetic oligonucleotide
  source 1..20: mol_type = other RNA
gtccaagcccggttgaaatc

SEQ ID NO: 1121 - RNA, 20 nt, synthetic construct
  misc_feature 1..20: note = Description of Artificial Sequence: Synthetic oligonucleotide
  source 1..20: mol_type = other RNA
tgtccaagcccggttgaaat

SEQ ID NO: 1122 - RNA, 20 nt, synthetic construct
  misc_feature 1..20: note = Description of Artificial Sequence: Synthetic oligonucleotide
  source 1..20: mol_type = other RNA
ctgtccaagcccggttgaaa

SEQ ID NO: 1123 - RNA, 20 nt, synthetic construct
  misc_feature 1..20: note = Description of Artificial Sequence: Synthetic oligonucleotide
  source 1..20: mol_type = other RNA
tctgtccaagcccggttgaa

SEQ ID NO: 1124 - RNA, 20 nt, synthetic construct
  misc_feature 1..20: note = Description of Artificial Sequence: Synthetic oligonucleotide
  source 1..20: mol_type = other RNA
ttctgtccaagcccggttga

SEQ ID NO: 1125 - RNA, 20 nt, synthetic construct
  misc_feature 1..20: note = Description of Artificial Sequence: Synthetic oligonucleotide
  source 1..20: mol_type = other RNA
gttctgtccaagcccggttg

SEQ ID NO: 1126 - RNA, 20 nt, synthetic construct
  misc_feature 1..20: note = Description of Artificial Sequence: Synthetic oligonucleotide
  source 1..20: mol_type = other RNA
agttctgtccaagcccggtt

SEQ ID NO: 1127 - RNA, 20 nt, synthetic construct
  misc_feature 1..20: note = Description of Artificial Sequence: Synthetic oligonucleotide
  source 1..20: mol_type = other RNA
aagttctgtccaagcccggt

SEQ ID NO: 1128 - RNA, 20 nt, synthetic construct
  misc_feature 1..20: note = Description of Artificial Sequence: Synthetic oligonucleotide
  source 1..20: mol_type = other RNA
taagttctgtccaagcccgg

SEQ ID NO: 1129 - RNA, 20 nt, synthetic construct
  misc_feature 1..20: note = Description of Artificial Sequence: Synthetic oligonucleotide
  source 1..20: mol_type = other RNA
gtaagttctgtccaagcccg

SEQ ID NO: 1130 - RNA, 20 nt, synthetic construct
  misc_feature 1..20: note = Description of Artificial Sequence: Synthetic oligonucleotide
  source 1..20: mol_type = other RNA
ggtaagttctgtccaagccc

SEQ ID NO: 1131 - RNA, 20 nt, synthetic construct
  misc_feature 1..20: note = Description of Artificial Sequence: Synthetic oligonucleotide
  source 1..20: mol_type = other RNA
cagtcggtaagttctgtcca

SEQ ID NO: 1132 - RNA, 20 nt, synthetic construct
  misc_feature 1..20: note = Description of Artificial Sequence: Synthetic oligonucleotide
  source 1..20: mol_type = other RNA
ccagtcggtaagttctgtcc

SEQ ID NO: 1133 - RNA, 20 nt, synthetic construct
  misc_feature 1..20: note = Description of Artificial Sequence: Synthetic oligonucleotide
  source 1..20: mol_type = other RNA
ccaccatcaccctctgtgat

SEQ ID NO: 1134 - RNA, 20 nt, synthetic construct
  misc_feature 1..20: note = Description of Artificial Sequence: Synthetic oligonucleotide
  source 1..20: mol_type = other RNA
cccaccatcaccctctgtga

SEQ ID NO: 1135 - RNA, 20 nt, synthetic construct
  misc_feature 1..20: note = Description of Artificial Sequence: Synthetic oligonucleotide
  source 1..20: mol_type = other RNA
cacccaccatcaccctctgt

SEQ ID NO: 1136 - RNA, 20 nt, synthetic construct
  misc_feature 1..20: note = Description of Artificial Sequence: Synthetic oligonucleotide
  source 1..20: mol_type = other RNA
tcacccaccatcaccctctg

SEQ ID NO: 1137 - RNA, 20 nt, synthetic construct
  misc_feature 1..20: note = Description of Artificial Sequence: Synthetic oligonucleotide
  source 1..20: mol_type = other RNA
gtcacccaccatcaccctct

SEQ ID NO: 1138 - RNA, 20 nt, synthetic construct
  misc_feature 1..20: note = Description of Artificial Sequence: Synthetic oligonucleotide
  source 1..20: mol_type = other RNA
ggtcacccaccatcaccctc

SEQ ID NO: 1139 - RNA, 20 nt, synthetic construct
  misc_feature 1..20: note = Description of Artificial Sequence: Synthetic oligonucleotide
  source 1..20: mol_type = other RNA
tcaagcagagaaagccagtc

SEQ ID NO: 1140 - RNA, 20 nt, synthetic construct
  misc_feature 1..20: note = Description of Artificial Sequence: Synthetic oligonucleotide
  source 1..20: mol_type = other RNA
ttgatcaagcagagaaagcc

SEQ ID NO: 1141 - RNA, 25 nt, synthetic construct
  misc_feature 1..25: note = Description of Artificial Sequence: Synthetic oligonucleotide
  source 1..25: mol_type = other RNA
caaagaagatggcatttctagtttg

SEQ ID NO: 1142 - RNA, 20 nt, synthetic construct
  misc_feature 1..20: note = Description of Artificial Sequence: Synthetic oligonucleotide
  source 1..20: mol_type = other RNA
gcaaagaagatggcatttct

SEQ ID NO: 1143 - RNA, 20 nt, synthetic construct
  misc_feature 1..20: note = Description of Artificial Sequence: Synthetic oligonucleotide
  source 1..20: mol_type = other RNA
gcaaagaagatggcatttct

SEQ ID NO: 1144 - RNA, 20 nt, synthetic construct
  misc_feature 1..20: note = Description of Artificial Sequence: Synthetic oligonucleotide
  source 1..20: mol_type = other RNA
tcaaggaagatggcatttct

SEQ ID NO: 1145 - RNA, 20 nt, synthetic construct
  misc_feature 1..20: note = Description of Artificial Sequence: Synthetic oligonucleotide
  source 1..20: mol_type = other RNA
tcaaggaagatggcatttct

SEQ ID NO: 1146 - RNA, 20 nt, synthetic construct
  misc_feature 1..20: note = Description of Artificial Sequence: Synthetic oligonucleotide
  source 1..20: mol_type = other RNA
tcaaggaagatggcatttct

SEQ ID NO: 1147 - RNA, 20 nt, synthetic construct
  misc_feature 1..20: note = Description of Artificial Sequence: Synthetic oligonucleotide
  source 1..20: mol_type = other RNA
tcaaggaagatggcatttct

SEQ ID NO: 1148 - RNA, 20 nt, synthetic construct
  misc_feature 1..20: note = Description of Artificial Sequence: Synthetic oligonucleotide
  source 1..20: mol_type = other RNA
tcaaggaagatggcatttct

SEQ ID NO: 1149 - RNA, 20 nt, synthetic construct
  misc_feature 1..20: note = Description of Artificial Sequence: Synthetic oligonucleotide
  source 1..20: mol_type = other RNA
tcaaggaagatggcatttct

SEQ ID NO: 1150 - RNA, 20 nt, synthetic construct
  misc_feature 1..20: note = Description of Artificial Sequence: Synthetic oligonucleotide
  source 1..20: mol_type = other RNA
tcaaggaagatggcatttct

SEQ ID NO: 1151 - RNA, 20 nt, synthetic construct
  misc_feature 1..20: note = Description of Artificial Sequence: Synthetic oligonucleotide
  source 1..20: mol_type = other RNA
tcaaggaagatggcatttct

SEQ ID NO: 1152 - RNA, 20 nt, synthetic construct
  misc_feature 1..20: note = Description of Artificial Sequence: Synthetic oligonucleotide
  source 1..20: mol_type = other RNA
tcaaggaagatggcatttct

SEQ ID NO: 1153 - RNA, 20 nt, synthetic construct
  misc_feature 1..20: note = Description of Artificial Sequence: Synthetic oligonucleotide
  source 1..20: mol_type = other RNA
tcaaggaagatggcatttct

SEQ ID NO: 1154 - RNA, 20 nt, synthetic construct
  misc_feature 1..20: note = Description of Artificial Sequence: Synthetic oligonucleotide
  source 1..20: mol_type = other RNA
tcaaggaagatggcatttct

SEQ ID NO: 1155 - RNA, 20 nt, synthetic construct
  misc_feature 1..20: note = Description of Artificial Sequence: Synthetic oligonucleotide
  source 1..20: mol_type = other RNA
tcaaggaagatggcatttct

SEQ ID NO: 1156 - RNA, 20 nt, synthetic construct
  misc_feature 1..20: note = Description of Artificial Sequence: Synthetic oligonucleotide
  source 1..20: mol_type = other RNA
tcaaggaagatggcatttct

SEQ ID NO: 1157 - RNA, 20 nt, synthetic construct
  misc_feature 1..20: note = Description of Artificial Sequence: Synthetic oligonucleotide
  source 1..20: mol_type = other RNA
tcaaggaagatggcatttct

SEQ ID NO: 1158 - RNA, 20 nt, synthetic construct
  misc_feature 1..20: note = Description of Artificial Sequence: Synthetic oligonucleotide
  source 1..20: mol_type = other RNA
tcaaggaagatggcatttct

SEQ ID NO: 1159 - RNA, 20 nt, synthetic construct
  misc_feature 1..20: note = Description of Artificial Sequence: Synthetic oligonucleotide
  source 1..20: mol_type = other RNA
tcaaggaagatggcatttct

SEQ ID NO: 1160 - RNA, 20 nt, synthetic construct
  misc_feature 1..20: note = Description of Artificial Sequence: Synthetic oligonucleotide
  source 1..20: mol_type = other RNA
tcaaggaagatggcatttct

SEQ ID NO: 1161 - RNA, 20 nt, synthetic construct
  misc_feature 1..20: note = Description of Artificial Sequence: Synthetic oligonucleotide
  source 1..20: mol_type = other RNA
tcaaggaagatggcatttct

SEQ ID NO: 1162 - RNA, 20 nt, synthetic construct
  misc_feature 1..20: note = Description of Artificial Sequence: Synthetic oligonucleotide
  source 1..20: mol_type = other RNA
tcaaggaagatggcatttct

SEQ ID NO: 1163 - RNA, 20 nt, synthetic construct
  misc_feature 1..20: note = Description of Artificial Sequence: Synthetic oligonucleotide
  source 1..20: mol_type = other RNA
tcaaggaagatggcatttct

SEQ ID NO: 1164 - RNA, 20 nt, synthetic construct
  misc_feature 1..20: note = Description of Artificial Sequence: Synthetic oligonucleotide
  source 1..20: mol_type = other RNA
tcaaggaagatggcatttct

SEQ ID NO: 1165 - RNA, 20 nt, synthetic construct
  misc_feature 1..20: note = Description of Artificial Sequence: Synthetic oligonucleotide
  source 1..20: mol_type = other RNA
tcaaggaagatggcatttct

SEQ ID NO: 1166 - RNA, 20 nt, synthetic construct
  misc_feature 1..20: note = Description of Artificial Sequence: Synthetic oligonucleotide
  source 1..20: mol_type = other RNA
tcaaggaagatggcatttct

SEQ ID NO: 1167 - RNA, 20 nt, synthetic construct
  misc_feature 1..20: note = Description of Artificial Sequence: Synthetic oligonucleotide
  source 1..20: mol_type = other RNA
tcaaggaagatggcatttct

SEQ ID NO: 1168 - RNA, 20 nt, synthetic construct
  misc_feature 1..20: note = Description of Artificial Sequence: Synthetic oligonucleotide
  source 1..20: mol_type = other RNA
tcaaggaagatggcatttct

SEQ ID NO: 1169 - RNA, 20 nt, synthetic construct
  misc_feature 1..20: note = Description of Artificial Sequence: Synthetic oligonucleotide
  source 1..20: mol_type = other RNA
tcaaggaagatggcatttct

SEQ ID NO: 1170 - RNA, 20 nt, synthetic construct
  misc_feature 1..20: note = Description of Artificial Sequence: Synthetic oligonucleotide
  source 1..20: mol_type = other RNA
tcaaggaagatggcatttct

SEQ ID NO: 1171 - RNA, 20 nt, synthetic construct
  misc_feature 1..20: note = Description of Artificial Sequence: Synthetic oligonucleotide
  source 1..20: mol_type = other RNA
tcaaggaagatggcatttct

SEQ ID NO: 1172 - RNA, 20 nt, synthetic construct
  misc_feature 1..20: note = Description of Artificial Sequence: Synthetic oligonucleotide
  source 1..20: mol_type = other RNA
tcaaggaagatggcatttct

SEQ ID NO: 1173 - RNA, 20 nt, synthetic construct
  misc_feature 1..20: note = Description of Artificial Sequence: Synthetic oligonucleotide
  source 1..20: mol_type = other RNA
ggccaaacctcggcttacct

SEQ ID NO: 1174 - RNA, 20 nt, synthetic construct
  misc_feature 1..20: note = Description of Artificial Sequence: Synthetic oligonucleotide
  source 1..20: mol_type = other RNA
ggccaaacctcggcttacct

SEQ ID NO: 1175 - RNA, 20 nt, synthetic construct
  misc_feature 1..20: note = Description of Artificial Sequence: Synthetic oligonucleotide
  source 1..20: mol_type = other RNA
ggccaaacctcggcttacct

SEQ ID NO: 1176 - RNA, 20 nt, synthetic construct
  misc_feature 1..20: note = Description of Artificial Sequence: Synthetic oligonucleotide
  source 1..20: mol_type = other RNA
ggccaaacctcggcttacct

SEQ ID NO: 1177 - RNA, 20 nt, synthetic construct
  misc_feature 1..20: note = Description of Artificial Sequence: Synthetic oligonucleotide
  source 1..20: mol_type = other RNA
ggccaaacctcggcttacct

SEQ ID NO: 1178 - RNA, 20 nt, synthetic construct
  misc_feature 1..20: note = Description of Artificial Sequence: Synthetic oligonucleotide
  source 1..20: mol_type = other RNA
ggccaaacctcggcttacct

SEQ ID NO: 1179 - RNA, 20 nt, synthetic construct
  misc_feature 1..20: note = Description of Artificial Sequence: Synthetic oligonucleotide
  source 1..20: mol_type = other RNA
ggccaaacctcggcttacct

SEQ ID NO: 1180 - RNA, 20 nt, synthetic construct
  misc_feature 1..20: note = Description of Artificial Sequence: Synthetic oligonucleotide
  source 1..20: mol_type = other RNA
ggccaaacctcggcttacct

SEQ ID NO: 1181 - RNA, 20 nt, synthetic construct
  misc_feature 1..20: note = Description of Artificial Sequence: Synthetic oligonucleotide
  source 1..20: mol_type = other RNA
tcaaggaagatggcatttct

SEQ ID NO: 1182 - RNA, 20 nt, synthetic construct
  misc_feature 1..20: note = Description of Artificial Sequence: Synthetic oligonucleotide
  source 1..20: mol_type = other RNA
tcaaggaagatggcatttct

SEQ ID NO: 1183 - RNA, 20 nt, synthetic construct
  misc_feature 1..20: note = Description of Artificial Sequence: Synthetic oligonucleotide
  source 1..20: mol_type = other RNA
tcaaggaagatggcatttct

SEQ ID NO: 1184 - RNA, 20 nt, synthetic construct
  misc_feature 1..20: note = Description of Artificial Sequence: Synthetic oligonucleotide
  source 1..20: mol_type = other RNA
tcaaggaagatggcatttct

SEQ ID NO: 1185 - RNA, 20 nt, synthetic construct
  misc_feature 1..20: note = Description of Artificial Sequence: Synthetic oligonucleotide
  source 1..20: mol_type = other RNA
tcaaggaagatggcatttct

SEQ ID NO: 1186 - RNA, 20 nt, synthetic construct
  misc_feature 1..20: note = Description of Artificial Sequence: Synthetic oligonucleotide
  source 1..20: mol_type = other RNA
tcaaggaagatggcatttct

SEQ ID NO: 1187 - RNA, 20 nt, synthetic construct
  misc_feature 1..20: note = Description of Artificial Sequence: Synthetic oligonucleotide
  source 1..20: mol_type = other RNA
tcaaggaagatggcatttct

SEQ ID NO: 1188 - RNA, 20 nt, synthetic construct
  misc_feature 1..20: note = Description of Artificial Sequence: Synthetic oligonucleotide
  source 1..20: mol_type = other RNA
tcaaggaagatggcatttct

SEQ ID NO: 1189 - DNA, 20 bp, synthetic construct
  misc_feature 1..20: note = Description of Artificial Sequence: Synthetic oligonucleotide
  source 1..20: mol_type = other DNA
ggccaaacctcggcttacct

SEQ ID NO: 1190 - RNA, 20 nt, synthetic construct
  misc_feature 1..20: note = Description of Artificial Sequence: Synthetic oligonucleotide
  source 1..20: mol_type = other RNA
ggccaaacctcggcttacct

SEQ ID NO: 1191 - DNA, 20 bp, synthetic construct
  misc_feature 1..20: note = Description of Artificial Sequence: Synthetic oligonucleotide
  source 1..20: mol_type = other DNA
ggccaaacctcggcttacct

SEQ ID NO: 1192 - DNA, 20 bp, synthetic construct
  misc_feature 1..20: note = Description of Artificial Sequence: Synthetic oligonucleotide
  source 1..20: mol_type = other DNA
ggccaaacctcggcttacct

SEQ ID NO: 1193 - RNA, 20 nt, synthetic construct
  modified_base 15..16: mod_base = OTHER; note = thymine
  modified_base 20: mod_base = OTHER; note = thymine
  misc_feature 1..20: note = Description of Combined DNA/RNA Molecule: Synthetic oligonucleotide
  source 1..20: mol_type = other RNA
ggccaaacctcggcttacct

SEQ ID NO: 1194 - RNA, 20 nt, synthetic construct
  modified_base 10: mod_base = OTHER; note = thymine
  modified_base 15..16: mod_base = OTHER; note = thymine
  misc_feature 1..20: note = Description of Combined DNA/RNA Molecule: Synthetic oligonucleotide
  source 1..20: mol_type = other RNA
ggccaaacctcggcttacct

SEQ ID NO: 1195 - RNA, 20 nt, synthetic construct
  modified_base 15: mod_base = OTHER; note = thymine
  misc_feature 1..20: note = Description of Combined DNA/RNA Molecule: Synthetic oligonucleotide
  source 1..20: mol_type = other RNA
ggccaaacctcggcttacct

SEQ ID NO: 1196 - RNA, 20 nt, synthetic construct
  modified_base 10: mod_base = OTHER; note = thymine
  modified_base 16: mod_base = OTHER; note = thymine
  misc_feature 1..20: note = Description of Combined DNA/RNA Molecule: Synthetic oligonucleotide
  source 1..20: mol_type = other RNA
ggccaaacctcggcttacct

SEQ ID NO: 1197 - RNA, 20 nt, synthetic construct
  modified_base 10: mod_base = OTHER; note = thymine
  modified_base 15: mod_base = OTHER; note = thymine
  misc_feature 1..20: note = Description of Combined DNA/RNA Molecule: Synthetic oligonucleotide
  source 1..20: mol_type = other RNA
ggccaaacctcggcttacct

SEQ ID NO: 1198 - RNA, 20 nt, synthetic construct
  misc_feature 1..20: note = Description of Artificial Sequence: Synthetic oligonucleotide
  source 1..20: mol_type = other RNA
ggccaaacctcggcttacct

SEQ ID NO: 1199 - RNA, 20 nt, synthetic construct
  modified_base 10: mod_base = OTHER; note = thymine
  modified_base 16: mod_base = OTHER; note = thymine
  misc_feature 1..20: note = Description of Combined DNA/RNA Molecule: Synthetic oligonucleotide
  source 1..20: mol_type = other RNA
ggccaaacctcggcttacct

SEQ ID NO: 1200 - RNA, 20 nt, synthetic construct
  modified_base 10: mod_base = OTHER; note = thymine
  modified_base 15: mod_base = OTHER; note = thymine
  misc_feature 1..20: note = Description of Combined DNA/RNA Molecule: Synthetic oligonucleotide
  source 1..20: mol_type = other RNA
ggccaaacctcggcttacct

SEQ ID NO: 1201 - RNA, 20 nt, synthetic construct
  modified_base 15..16: mod_base = OTHER; note = thymine
  misc_feature 1..20: note = Description of Combined DNA/RNA Molecule: Synthetic oligonucleotide
  source 1..20: mol_type = other RNA
ggccaaacctcggcttacct

SEQ ID NO: 1202 - RNA, 20 nt, synthetic construct
  modified_base 15..16: mod_base = OTHER; note = thymine
  modified_base 20: mod_base = OTHER; note = thymine
  misc_feature 1..20: note = Description of Combined DNA/RNA Molecule: Synthetic oligonucleotide
  source 1..20: mol_type = other RNA
ggccaaacctcggcttacct

SEQ ID NO: 1203 - RNA, 20 nt, synthetic construct
  modified_base 10: mod_base = OTHER; note = thymine
  modified_base 15..16: mod_base = OTHER; note = thymine
  misc_feature 1..20: note = Description of Combined DNA/RNA Molecule: Synthetic oligonucleotide
  source 1..20: mol_type = other RNA
ggccaaacctcggcttacct

SEQ ID NO: 1204 - RNA, 20 nt, synthetic construct
  modified_base 15: mod_base = OTHER; note = thymine
  misc_feature 1..20: note = Description of Combined DNA/RNA Molecule: Synthetic oligonucleotide
  source 1..20: mol_type = other RNA
ggccaaacctcggcttacct

SEQ ID NO: 1205 - RNA, 20 nt, synthetic construct
  modified_base 10: mod_base = OTHER; note = thymine
  modified_base 16: mod_base = OTHER; note = thymine
  misc_feature 1..20: note = Description of Combined DNA/RNA Molecule: Synthetic oligonucleotide
  source 1..20: mol_type = other RNA
ggccaaacctcggcttacct

SEQ ID NO: 1206 - RNA, 20 nt, synthetic construct
  modified_base 10: mod_base = OTHER; note = thymine
  modified_base 15: mod_base = OTHER; note = thymine
  misc_feature 1..20: note = Description of Combined DNA/RNA Molecule: Synthetic oligonucleotide
  source 1..20: mol_type = other RNA
ggccaaacctcggcttacct

SEQ ID NO: 1207 - RNA, 20 nt, synthetic construct
  misc_feature 1..20: note = Description of Artificial Sequence: Synthetic oligonucleotide
  source 1..20: mol_type = other RNA
ggccaaacctcggcttacct

SEQ ID NO: 1208 - RNA, 20 nt, synthetic construct
  modified_base 10: mod_base = OTHER; note = thymine
  modified_base 16: mod_base = OTHER; note = thymine
  misc_feature 1..20: note = Description of Combined DNA/RNA Molecule: Synthetic oligonucleotide
  source 1..20: mol_type = other RNA
ggccaaacctcggcttacct

SEQ ID NO: 1209 - RNA, 20 nt, synthetic construct
  modified_base 10: mod_base = OTHER; note = thymine
  modified_base 15: mod_base = OTHER; note = thymine
  misc_feature 1..20: note = Description of Combined DNA/RNA Molecule: Synthetic oligonucleotide
  source 1..20: mol_type = other RNA
ggccaaacctcggcttacct

SEQ ID NO: 1210 - RNA, 20 nt, synthetic construct
  modified_base 15..16: mod_base = OTHER; note = thymine
  misc_feature 1..20: note = Description of Combined DNA/RNA Molecule: Synthetic oligonucleotide
  source 1..20: mol_type = other RNA
ggccaaacctcggcttacct

SEQ ID NO: 1211 - RNA, 20 nt, synthetic construct
  modified_base 16: mod_base = OTHER; note = thymine
  misc_feature 1..20: note = Description of Combined DNA/RNA Molecule: Synthetic oligonucleotide
  source 1..20: mol_type = other RNA
ggccaaacctcggcttacct

SEQ ID NO: 1212 - RNA, 20 nt, synthetic construct
  misc_feature 1..20: note = Description of Artificial Sequence: Synthetic oligonucleotide
  source 1..20: mol_type = other RNA
ggccaaacctcggcttacct

SEQ ID NO: 1213 - RNA, 20 nt, synthetic construct
  misc_feature 1..20: note = Description of Artificial Sequence: Synthetic oligonucleotide
  source 1..20: mol_type = other RNA
ggccaaacctcggcttacct

SEQ ID NO: 1214 - RNA, 20 nt, synthetic construct
  misc_feature 1..20: note = Description of Artificial Sequence: Synthetic oligonucleotide
  source 1..20: mol_type = other RNA
ggccaaacctcggcttacct

SEQ ID NO: 1215 - RNA, 20 nt, synthetic construct
  misc_feature 1..20: note = Description of Artificial Sequence: Synthetic oligonucleotide
  source 1..20: mol_type = other RNA
ggccaaacctcggcttacct

SEQ ID NO: 1216 - RNA, 20 nt, synthetic construct
  misc_feature 1..20: note = Description of Artificial Sequence: Synthetic oligonucleotide
  source 1..20: mol_type = other RNA
ggccaaacctcggcttacct

SEQ ID NO: 1217 - RNA, 20 nt, synthetic construct
  misc_feature 1..20: note = Description of Artificial Sequence: Synthetic oligonucleotide
  source 1..20: mol_type = other RNA
ggccaaacctcggcttacct

SEQ ID NO: 1218 - RNA, 20 nt, synthetic construct
  misc_feature 1..20: note = Description of Artificial Sequence: Synthetic oligonucleotide
  source 1..20: mol_type = other RNA
ggccaaacctcggcttacct

SEQ ID NO: 1219 - RNA, 20 nt, synthetic construct
  misc_feature 1..20: note = Description of Artificial Sequence: Synthetic oligonucleotide
  source 1..20: mol_type = other RNA
ggccaaacctcggcttacct

SEQ ID NO: 1220 - RNA, 20 nt, synthetic construct
  misc_feature 1..20: note = Description of Artificial Sequence: Synthetic oligonucleotide
  source 1..20: mol_type = other RNA
ggccaaacctcggcttacct

SEQ ID NO: 1221 - RNA, 20 nt, synthetic construct
  misc_feature 1..20: note = Description of Artificial Sequence: Synthetic oligonucleotide
  source 1..20: mol_type = other RNA
ggccaaacctcggcttacct

SEQ ID NO: 1222 - RNA, 20 nt, synthetic construct
  misc_feature 1..20: note = Description of Artificial Sequence: Synthetic oligonucleotide
  source 1..20: mol_type = other RNA
ggccaaacctcggcttacct

SEQ ID NO: 1223 - RNA, 25 nt, synthetic construct
  misc_feature 1..25: note = Description of Artificial Sequence: Synthetic oligonucleotide
  source 1..25: mol_type = other RNA
ggccaaacctcggcttacctgaaat

SEQ ID NO: 1224 - RNA, 20 nt, synthetic construct
  modified_base 16: mod_base = OTHER; note = thymine
  misc_feature 1..20: note = Description of Combined DNA/RNA Molecule: Synthetic oligonucleotide
  source 1..20: mol_type = other RNA
ggccaaacctcggcttacct

SEQ ID NO: 1225 - DNA, 20 bp, synthetic construct
  misc_feature 1..20: note = Description of Artificial Sequence: Synthetic oligonucleotide
  source 1..20: mol_type = other DNA
tcaaggaagatggcatttct

SEQ ID NO: 1226 - RNA, 20 nt, synthetic construct
  misc_feature 1..20: note = Description of Artificial Sequence: Synthetic oligonucleotide
  source 1..20: mol_type = other RNA
tcaaggaagatggcatttct

SEQ ID NO: 1227 - DNA, 20 bp, synthetic construct
  misc_feature 1..20: note = Description of Artificial Sequence: Synthetic oligonucleotide
  source 1..20: mol_type = other DNA
tcaaggaagatggcatttct

SEQ ID NO: 1228 - DNA, 20 bp, synthetic construct
  misc_feature 1..20: note = Description of Artificial Sequence: Synthetic oligonucleotide
  source 1..20: mol_type = other DNA
tcaaggaagatggcatttct

SEQ ID NO: 1229 - RNA, 20 nt, synthetic construct
  modified_base 1: mod_base = OTHER; note = thymine
  modified_base 16..18: mod_base = OTHER; note = thymine
  modified_base 20: mod_base = OTHER; note = thymine
  misc_feature 1..20: note = Description of Combined DNA/RNA Molecule: Synthetic oligonucleotide
  source 1..20: mol_type = other RNA
tcaaggaagatggcatttct

SEQ ID NO: 1230 - RNA, 20 nt, synthetic construct
  modified_base 11: mod_base = OTHER; note = thymine
  modified_base 16: mod_base = OTHER; note = thymine
  misc_feature 1..20: note = Description of Combined DNA/RNA Molecule: Synthetic oligonucleotide
  source 1..20: mol_type = other RNA
tcaaggaagatggcatttct

SEQ ID NO: 1231 - RNA, 20 nt, synthetic construct
  modified_base 1: mod_base = OTHER; note = thymine
  modified_base 11: mod_base = OTHER; note = thymine
  modified_base 17: mod_base = OTHER; note = thymine
  misc_feature 1..20: note = Description of Combined DNA/RNA Molecule: Synthetic oligonucleotide
  source 1..20: mol_type = other RNA
tcaaggaagatggcatttct

SEQ ID NO: 1232 - RNA, 20 nt, synthetic construct
  modified_base 16: mod_base = OTHER; note = thymine
  modified_base 18: mod_base = OTHER; note = thymine
  misc_feature 1..20: note = Description of Combined DNA/RNA Molecule: Synthetic oligonucleotide
  source 1..20: mol_type = other RNA
tcaaggaagatggcatttct

SEQ ID NO: 1233 - RNA, 20 nt, synthetic construct
  modified_base 1: mod_base = OTHER; note = thymine
  modified_base 11: mod_base = OTHER; note = thymine
  modified_base 18: mod_base = OTHER; note = thymine
  misc_feature 1..20: note = Description of Combined DNA/RNA Molecule: Synthetic oligonucleotide
  source 1..20: mol_type = other RNA
tcaaggaagatggcatttct

SEQ ID NO: 1234 - RNA, 20 nt, synthetic construct
  modified_base 1: mod_base = OTHER; note = thymine
  modified_base 17..18: mod_base = OTHER; note = thymine
  misc_feature 1..20: note = Description of Combined DNA/RNA Molecule: Synthetic oligonucleotide
  source 1..20: mol_type = other RNA
tcaaggaagatggcatttct

SEQ ID NO: 1235 - RNA, 20 nt, synthetic construct
  modified_base 1: mod_base = OTHER; note = thymine
  modified_base 11: mod_base = OTHER; note = thymine
  modified_base 16..18: mod_base = OTHER; note = thymine
  misc_feature 1..20: note = Description of Combined DNA/RNA Molecule: Synthetic oligonucleotide
  source 1..20: mol_type = other RNA
tcaaggaagatggcatttct

SEQ ID NO: 1236 - RNA, 20 nt, synthetic construct
  modified_base 1: mod_base = OTHER; note = thymine
  modified_base 11: mod_base = OTHER; note = thymine
  modified_base 17..18: mod_base = OTHER; note = thymine
  misc_feature 1..20: note = Description of Combined DNA/RNA Molecule: Synthetic oligonucleotide
  source 1..20: mol_type = other RNA
tcaaggaagatggcatttct

SEQ ID NO: 1237 - RNA, 20 nt, synthetic construct
  modified_base 16..18: mod_base = OTHER; note = thymine
  misc_feature 1..20: note = Description of Combined DNA/RNA Molecule: Synthetic oligonucleotide
  source 1..20: mol_type = other RNA
tcaaggaagatggcatttct

SEQ ID NO: 1238 - RNA, 20 nt, synthetic construct
  modified_base 1: mod_base = OTHER; note = thymine
  modified_base 11: mod_base = OTHER; note = thymine
  modified_base 16..18: mod_base = OTHER; note = thymine
  misc_feature 1..20: note = Description of Combined DNA/RNA Molecule: Synthetic oligonucleotide
  source 1..20: mol_type = other RNA
tcaaggaagatggcatttct

SEQ ID NO: 1239 - RNA, 20 nt, synthetic construct
  modified_base 1: mod_base = OTHER; note = thymine
  modified_base 16..18: mod_base = OTHER; note = thymine
  modified_base 20: mod_base = OTHER; note = thymine
  misc_feature 1..20: note = Description of Combined DNA/RNA Molecule: Synthetic oligonucleotide
  source 1..20: mol_type = other RNA
tcaaggaagatggcatttct

SEQ ID NO: 1240 - RNA, 20 nt, synthetic construct
  modified_base 11: mod_base = OTHER; note = thymine
  modified_base 16: mod_base = OTHER; note = thymine
  misc_feature 1..20: note = Description of Combined DNA/RNA Molecule: Synthetic oligonucleotide
  source 1..20: mol_type = other RNA
tcaaggaagatggcatttct

SEQ ID NO: 1241 - RNA, 20 nt, synthetic construct
  modified_base 1: mod_base = OTHER; note = thymine
  modified_base 11: mod_base = OTHER; note = thymine
  modified_base 17: mod_base = OTHER; note = thymine
  misc_feature 1..20: note = Description of Combined DNA/RNA Molecule: Synthetic oligonucleotide
  source 1..20: mol_type = other RNA
tcaaggaagatggcatttct

SEQ ID NO: 1242 - RNA, 20 nt, synthetic construct
  modified_base 16: mod_base = OTHER; note = thymine
  modified_base 18: mod_base = OTHER; note = thymine
  misc_feature 1..20: note = Description of Combined DNA/RNA Molecule: Synthetic oligonucleotide
  source 1..20: mol_type = other RNA
tcaaggaagatggcatttct

SEQ ID NO: 1243 - RNA, 20 nt, synthetic construct
  modified_base 1: mod_base = OTHER; note = thymine
  modified_base 11: mod_base = OTHER; note = thymine
  modified_base 18: mod_base = OTHER; note = thymine
  misc_feature 1..20: note = Description of Combined DNA/RNA Molecule: Synthetic oligonucleotide
  source 1..20: mol_type = other RNA
tcaaggaagatggcatttct

SEQ ID NO: 1244 - RNA, 20 nt, synthetic construct
  modified_base 1: mod_base = OTHER; note = thymine
  modified_base 17..18: mod_base = OTHER; note = thymine
  misc_feature 1..20: note = Description of Combined DNA/RNA Molecule: Synthetic oligonucleotide
  source 1..20: mol_type = other RNA
tcaaggaagatggcatttct

SEQ ID NO: 1245 - RNA, 20 nt, synthetic construct
  modified_base 1: mod_base = OTHER; note = thymine
  modified_base 11: mod_base = OTHER; note = thymine
  modified_base 16..18: mod_base = OTHER; note = thymine
  misc_feature 1..20: note = Description of Combined DNA/RNA Molecule: Synthetic oligonucleotide
  source 1..20: mol_type = other RNA
tcaaggaagatggcatttct

SEQ ID NO: 1246 - RNA, 20 nt, synthetic construct
  modified_base 1: mod_base = OTHER; note = thymine
  modified_base 11: mod_base = OTHER; note = thymine
  modified_base 17..18: mod_base = OTHER; note = thymine
  misc_feature 1..20: note = Description of Combined DNA/RNA Molecule: Synthetic oligonucleotide
  source 1..20: mol_type = other RNA
tcaaggaagatggcatttct

SEQ ID NO: 1247 - RNA, 20 nt, synthetic construct
  modified_base 16..18: mod_base = OTHER; note = thymine
  misc_feature 1..20: note = Description of Combined DNA/RNA Molecule: Synthetic oligonucleotide
  source 1..20: mol_type = other RNA
tcaaggaagatggcatttct

SEQ ID NO: 1248 - RNA, 20 nt, synthetic construct
  modified_base 1: mod_base = OTHER; note = thymine
  modified_base 11: mod_base = OTHER; note = thymine
  modified_base 16..18: mod_base = OTHER; note = thymine
  misc_feature 1..20: note = Description of Combined DNA/RNA Molecule: Synthetic oligonucleotide
  source 1..20: mol_type = other RNA
tcaaggaagatggcatttct

SEQ ID NO: 1249 - RNA, 20 nt, synthetic construct
  misc_feature 1..20: note = Description of Artificial Sequence: Synthetic oligonucleotide
  source 1..20: mol_type = other RNA
tcaaggaagatggcatttct

SEQ ID NO: 1250 - RNA, 20 nt, synthetic construct
  misc_feature 1..20: note = Description of Artificial Sequence: Synthetic oligonucleotide
  source 1..20: mol_type = other RNA
tcaaggaagatggcatttct

SEQ ID NO: 1251 - RNA, 20 nt, synthetic construct
  misc_feature 1..20: note = Description of Artificial Sequence: Synthetic oligonucleotide
  source 1..20: mol_type = other RNA
tcaaggaagatggcatttct

SEQ ID NO: 1252 - RNA, 20 nt, synthetic construct
  misc_feature 1..20: note = Description of Artificial Sequence: Synthetic oligonucleotide
  source 1..20: mol_type = other RNA
tcaaggaagatggcatttct

SEQ ID NO: 1253 - RNA, 20 nt, synthetic construct
  misc_feature 1..20: note = Description of Artificial Sequence: Synthetic oligonucleotide
  source 1..20: mol_type = other RNA
tcaaggaagatggcatttct

SEQ ID NO: 1254 - RNA, 20 nt, synthetic construct
  misc_feature 1..20: note = Description of Artificial Sequence: Synthetic oligonucleotide
  source 1..20: mol_type = other RNA
tcaaggaagatggcatttct

SEQ ID NO: 1255 - RNA, 20 nt, synthetic construct
  misc_feature 1..20: note = Description of Artificial Sequence: Synthetic oligonucleotide
  source 1..20: mol_type = other RNA
tcaaggaagatggcatttct

SEQ ID NO: 1256 - RNA, 20 nt, synthetic construct
  misc_feature 1..20: note = Description of Artificial Sequence: Synthetic oligonucleotide
  source 1..20: mol_type = other RNA
tcaaggaagatggcatttct

SEQ ID NO: 1257 - RNA, 20 nt, synthetic construct
  misc_feature 1..20: note = Description of Artificial Sequence: Synthetic oligonucleotide
  source 1..20: mol_type = other RNA
tcaaggaagatggcatttct

SEQ ID NO: 1258 - RNA, 20 nt, synthetic construct
  misc_feature 1..20: note = Description of Artificial Sequence: Synthetic oligonucleotide
  source 1..20: mol_type = other RNA
tcaaggaagatggcatttct

SEQ ID NO: 1259 - RNA, 20 nt, synthetic construct
  misc_feature 1..20: note = Description of Artificial Sequence: Synthetic oligonucleotide
  source 1..20: mol_type = other RNA
agaaatgccatcttccttga

SEQ ID NO: 1260 - RNA, 20 nt, synthetic construct
  misc_feature 1..20: note = Description of Artificial Sequence: Synthetic oligonucleotide
  source 1..20: mol_type = other RNA
tcaaggaagatggcatttct

SEQ ID NO: 1261 - RNA, 20 nt, synthetic construct
  misc_feature 1..20: note = Description of Artificial Sequence: Synthetic oligonucleotide
  source 1..20: mol_type = other RNA
tcaaggaagatggcatttct

SEQ ID NO: 1262 - RNA, 20 nt, synthetic construct
  misc_feature 1..20: note = Description of Artificial Sequence: Synthetic oligonucleotide
  source 1..20: mol_type = other RNA
tcaaggaagatggcatttct

SEQ ID NO: 1263 - RNA, 20 nt, synthetic construct
  misc_feature 1..20: note = Description of Artificial Sequence: Synthetic oligonucleotide
  source 1..20: mol_type = other RNA
tcaaggaagatggcatttct

SEQ ID NO: 1264 - RNA, 20 nt, synthetic construct
  misc_feature 1..20: note = Description of Artificial Sequence: Synthetic oligonucleotide
  source 1..20: mol_type = other RNA
tcaaggaagatggcatttct

SEQ ID NO: 1265 - RNA, 20 nt, synthetic construct
  misc_feature 1..20: note = Description of Artificial Sequence: Synthetic oligonucleotide
  source 1..20: mol_type = other RNA
tcaaggaagatggcatttct

SEQ ID NO: 1266 - RNA, 20 nt, synthetic construct
  misc_feature 1..20: note = Description of Artificial Sequence: Synthetic oligonucleotide
  source 1..20: mol_type = other RNA
tcaaggaagatggcatttct

SEQ ID NO: 1267 - RNA, 20 nt, synthetic construct
  misc_feature 1..20: note = Description of Artificial Sequence: Synthetic oligonucleotide
  source 1..20: mol_type = other RNA
tcaaggaagatggcatttct

SEQ ID NO: 1268 - RNA, 20 nt, synthetic construct
  misc_feature 1..20: note = Description of Artificial Sequence: Synthetic oligonucleotide
  source 1..20: mol_type = other RNA
tcaaggaagatggcatttct

SEQ ID NO: 1269 - RNA, 20 nt, synthetic construct
  misc_feature 1..20: note = Description of Artificial Sequence: Synthetic oligonucleotide
  source 1..20: mol_type = other RNA
tcaaggaagatggcatttct

SEQ ID NO: 1270 - RNA, 20 nt, synthetic construct
  misc_feature 1..20: note = Description of Artificial Sequence: Synthetic oligonucleotide
  source 1..20: mol_type = other RNA
tcaaggaagatggcatttct

SEQ ID NO: 1271 - RNA, 20 nt, synthetic construct
  misc_feature 1..20: note = Description of Artificial Sequence: Synthetic oligonucleotide
  source 1..20: mol_type = other RNA
tcaaggaagatggcatttct

SEQ ID NO: 1272 - RNA, 20 nt, synthetic construct
  misc_feature 1..20: note = Description of Artificial Sequence: Synthetic oligonucleotide
  source 1..20: mol_type = other RNA
tcaaggaagatggcatttct

SEQ ID NO: 1273 - RNA, 20 nt, synthetic construct
  misc_feature 1..20: note = Description of Artificial Sequence: Synthetic oligonucleotide
  source 1..20: mol_type = other RNA
tcaaggaagatggcatttct

SEQ ID NO: 1274 - RNA, 20 nt, synthetic construct
  misc_feature 1..20: note = Description of Artificial Sequence: Synthetic oligonucleotide
  source 1..20: mol_type = other RNA
tcaaggaagatggcatttct

SEQ ID NO: 1275 - RNA, 20 nt, synthetic construct
  misc_feature 1..20: note = Description of Artificial Sequence: Synthetic oligonucleotide
  source 1..20: mol_type = other RNA
tcaaggaagatggcatttct

SEQ ID NO: 1276 - RNA, 20 nt, synthetic construct
  misc_feature 1..20: note = Description of Artificial Sequence: Synthetic oligonucleotide
  source 1..20: mol_type = other RNA
tcaaggaagatggcatttct

SEQ ID NO: 1277 - RNA, 20 nt, synthetic construct
  misc_feature 1..20: note = Description of Artificial Sequence: Synthetic oligonucleotide
  source 1..20: mol_type = other RNA
tcaaggaagatggcatttct

SEQ ID NO: 1278 - RNA, 20 nt, synthetic construct
  misc_feature 1..20: note = Description of Artificial Sequence: Synthetic oligonucleotide
  source 1..20: mol_type = other RNA
tcaaggaagatggcatttct

SEQ ID NO: 1279 - RNA, 20 nt, synthetic construct
  misc_feature 1..20: note = Description of Artificial Sequence: Synthetic oligonucleotide
  source 1..20: mol_type = other RNA
tcaaggaagatggcatttct

SEQ ID NO: 1280 - RNA, 20 nt, synthetic construct
  misc_feature 1..20: note = Description of Artificial Sequence: Synthetic oligonucleotide
  source 1..20: mol_type = other RNA
tcaaggaagatggcatttct

SEQ ID NO: 1281 - RNA, 20 nt, synthetic construct
  misc_feature 1..20: note = Description of Artificial Sequence: Synthetic oligonucleotide
  source 1..20: mol_type = other RNA
tcaaggaagatggcatttct

SEQ ID NO: 1282 - RNA, 20 nt, synthetic construct
  misc_feature 1..20: note = Description of Artificial Sequence: Synthetic oligonucleotide
  source 1..20: mol_type = other RNA
tcaaggaagatggcatttct

SEQ ID NO: 1283 - RNA, 20 nt, synthetic construct
  misc_feature 1..20: note = Description of Artificial Sequence: Synthetic oligonucleotide
  source 1..20: mol_type = other RNA
tcaaggaagatggcatttct

SEQ ID NO: 1284 - RNA, 20 nt, synthetic construct
  misc_feature 1..20: note = Description of Artificial Sequence: Synthetic oligonucleotide
  source 1..20: mol_type = other RNA
tcaaggaagatggcatttct

SEQ ID NO: 1285 - RNA, 20 nt, synthetic construct
  misc_feature 1..20: note = Description of Artificial Sequence: Synthetic oligonucleotide
  source 1..20: mol_type = other RNA
tcaaggaagatggcatttct

SEQ ID NO: 1286 - RNA, 20 nt, synthetic construct
  misc_feature 1..20: note = Description of Artificial Sequence: Synthetic oligonucleotide
  source 1..20: mol_type = other RNA
tcaaggaagatggcatttct

SEQ ID NO: 1287 - RNA, 20 nt, synthetic construct
  misc_feature 1..20: note = Description of Artificial Sequence: Synthetic oligonucleotide
  source 1..20: mol_type = other RNA
tcaaggaagatggcatttct

SEQ ID NO: 1288 - RNA, 20 nt, synthetic construct
  misc_feature 1..20: note = Description of Artificial Sequence: Synthetic oligonucleotide
  source 1..20: mol_type = other RNA
tcaaggaagatggcatttct

SEQ ID NO: 1289 - RNA, 20 nt, synthetic construct
  misc_feature 1..20: note = Description of Artificial Sequence: Synthetic oligonucleotide
  source 1..20: mol_type = other RNA
tcaaggaagatggcatttct

SEQ ID NO: 1290 - RNA, 20 nt, synthetic construct
  misc_feature 1..20: note = Description of Artificial Sequence: Synthetic oligonucleotide
  source 1..20: mol_type = other RNA
tcaaggaagatggcatttct

SEQ ID NO: 1291 - RNA, 20 nt, synthetic construct
  misc_feature 1..20: note = Description of Artificial Sequence: Synthetic oligonucleotide
  source 1..20: mol_type = other RNA
tcaaggaagatggcatttct

SEQ ID NO: 1292 - RNA, 20 nt, synthetic construct
  misc_feature 1..20: note = Description of Artificial Sequence: Synthetic oligonucleotide
  source 1..20: mol_type = other RNA
tcaaggaagatggcatttct

SEQ ID NO: 1293 - RNA, 20 nt, synthetic construct
  misc_feature 1..20: note = Description of Artificial Sequence: Synthetic oligonucleotide
  source 1..20: mol_type = other RNA
tcaaggaagatggcatttct

SEQ ID NO: 1294 - RNA, 20 nt, synthetic construct
  misc_feature 1..20: note = Description of Artificial Sequence: Synthetic oligonucleotide
  source 1..20: mol_type = other RNA
tcaaggaagatggcatttct

SEQ ID NO: 1295 - RNA, 20 nt, synthetic construct
  misc_feature 1..20: note = Description of Artificial Sequence: Synthetic oligonucleotide
  source 1..20: mol_type = other RNA
tcaaggaagatggcatttct

SEQ ID NO: 1296 - RNA, 20 nt, synthetic construct
  misc_feature 1..20: note = Description of Artificial Sequence: Synthetic oligonucleotide
  source 1..20: mol_type = other RNA
tcaaggaagatggcatttct

SEQ ID NO: 1297 - RNA, 20 nt, synthetic construct
  misc_feature 1..20: note = Description of Artificial Sequence: Synthetic oligonucleotide
  source 1..20: mol_type = other RNA
tcaaggaagatggcatttct

SEQ ID NO: 1298 - RNA, 20 nt, synthetic construct
  misc_feature 1..20: note = Description of Artificial Sequence: Synthetic oligonucleotide
  source 1..20: mol_type = other RNA
tcaaggaagatggcatttct

SEQ ID NO: 1299 - RNA, 20 nt, synthetic construct
  misc_feature 1..20: note = Description of Artificial Sequence: Synthetic oligonucleotide
  source 1..20: mol_type = other RNA
tcaaggaagatggcatttct

SEQ ID NO: 1300 - RNA, 20 nt, synthetic construct
  misc_feature 1..20: note = Description of Artificial Sequence: Synthetic oligonucleotide
  source 1..20: mol_type = other RNA
tcaaggaagatggcatttct

SEQ ID NO: 1301 - RNA, 20 nt, synthetic construct
  misc_feature 1..20: note = Description of Artificial Sequence: Synthetic oligonucleotide
  source 1..20: mol_type = other RNA
tcaaggaagatggcatttct

SEQ ID NO: 1302 - RNA, 20 nt, synthetic construct
  misc_feature 1..20: note = Description of Artificial Sequence: Synthetic oligonucleotide
  source 1..20: mol_type = other RNA
tcaaggaagatggcatttct

SEQ ID NO: 1303 - RNA, 20 nt, synthetic construct
  misc_feature 1..20: note = Description of Artificial Sequence: Synthetic oligonucleotide
  source 1..20: mol_type = other RNA
tcaaggaagatggcatttct

SEQ ID NO: 1304 - RNA, 20 nt, synthetic construct
  misc_feature 1..20: note = Description of Artificial Sequence: Synthetic oligonucleotide
  source 1..20: mol_type = other RNA
tcaaggaagatggcatttct

SEQ ID NO: 1305 - RNA, 20 nt, synthetic construct
  misc_feature 1..20: note = Description of Artificial Sequence: Synthetic oligonucleotide
  source 1..20: mol_type = other RNA
tcaaggaagatggcatttct

SEQ ID NO: 1306 - RNA, 20 nt, synthetic construct
  misc_feature 1..20: note = Description of Artificial Sequence: Synthetic oligonucleotide
  source 1..20: mol_type = other RNA
tcaaggaagatggcatttct

SEQ ID NO: 1307 - RNA, 20 nt, synthetic construct
  misc_feature 1..20: note = Description of Artificial Sequence: Synthetic oligonucleotide
  source 1..20: mol_type = other RNA
tcaaggaagatggcatttct

SEQ ID NO: 1308 - RNA, 20 nt, synthetic construct
  misc_feature 1..20: note = Description of Artificial Sequence: Synthetic oligonucleotide
  source 1..20: mol_type = other RNA
tcaaggaagatggcatttct

SEQ ID NO: 1309 - RNA, 20 nt, synthetic construct
  misc_feature 1..20: note = Description of Artificial Sequence: Synthetic oligonucleotide
  source 1..20: mol_type = other RNA
tcaaggaagatggcatttct

SEQ ID NO: 1310 - RNA, 20 nt, synthetic construct
  misc_feature 1..20: note = Description of Artificial Sequence: Synthetic oligonucleotide
  source 1..20: mol_type = other RNA
tcaaggaagatggcatttct

SEQ ID NO: 1311 - RNA, 20 nt, synthetic construct
  misc_feature 1..20: note = Description of Artificial Sequence: Synthetic oligonucleotide
  source 1..20: mol_type = other RNA
tcaaggaagatggcatttct

SEQ ID NO: 1312 - RNA, 20 nt, synthetic construct
  misc_feature 1..20: note = Description of Artificial Sequence: Synthetic oligonucleotide
  source 1..20: mol_type = other RNA
tcaaggaagatggcatttct

SEQ ID NO: 1313 - RNA, 20 nt, synthetic construct
  misc_feature 1..20: note = Description of Artificial Sequence: Synthetic oligonucleotide
  source 1..20: mol_type = other RNA
tcaaggaagatggcatttct

SEQ ID NO: 1314 - RNA, 20 nt, synthetic construct
  misc_feature 1..20: note = Description of Artificial Sequence: Synthetic oligonucleotide
  source 1..20: mol_type = other RNA
tcaaggaagatggcatttct

SEQ ID NO: 1315 - RNA, 20 nt, synthetic construct
  misc_feature 1..20: note = Description of Artificial Sequence: Synthetic oligonucleotide
  source 1..20: mol_type = other RNA
tcaaggaagatggcatttct

SEQ ID NO: 1316 - RNA, 20 nt, synthetic construct
  misc_feature 1..20: note = Description of Artificial Sequence: Synthetic oligonucleotide
  source 1..20: mol_type = other RNA
tcaaggaagatggcatttct

SEQ ID NO: 1317 - RNA, 20 nt, synthetic construct
  misc_feature 1..20: note = Description of Artificial Sequence: Synthetic oligonucleotide
  source 1..20: mol_type = other RNA
tcaaggaagatggcatttct

SEQ ID NO: 1318 - RNA, 20 nt, synthetic construct
  misc_feature 1..20: note = Description of Artificial Sequence: Synthetic oligonucleotide
  source 1..20: mol_type = other RNA
tcaaggaagatggcatttct

SEQ ID NO: 1319 - RNA, 20 nt, synthetic construct
  misc_feature 1..20: note = Description of Artificial Sequence: Synthetic oligonucleotide
  source 1..20: mol_type = other RNA
tcaaggaagatggcatttct

SEQ ID NO: 1320 - RNA, 20 nt, synthetic construct
  misc_feature 1..20: note = Description of Artificial Sequence: Synthetic oligonucleotide
  source 1..20: mol_type = other RNA
tcaaggaagatggcatttct

SEQ ID NO: 1321 - RNA, 20 nt, synthetic construct
  misc_feature 1..20: note = Description of Artificial Sequence: Synthetic oligonucleotide
  source 1..20: mol_type = other RNA
tcaaggaagatggcatttct

SEQ ID NO: 1322 - RNA, 20 nt, synthetic construct
  misc_feature 1..20: note = Description of Artificial Sequence: Synthetic oligonucleotide
  source 1..20: mol_type = other RNA
tcaaggaagatggcatttct

SEQ ID NO: 1323 - RNA, 20 nt, synthetic construct
  misc_feature 1..20: note = Description of Artificial Sequence: Synthetic oligonucleotide
  source 1..20: mol_type = other RNA
tcaaggaagatggcatttct

SEQ ID NO: 1324 - RNA, 20 nt, synthetic construct
  misc_feature 1..20: note = Description of Artificial Sequence: Synthetic oligonucleotide
  source 1..20: mol_type = other RNA
tcaaggaagatggcatttct

SEQ ID NO: 1325 - RNA, 20 nt, synthetic construct
  misc_feature 1..20: note = Description of Artificial Sequence: Synthetic oligonucleotide
  source 1..20: mol_type = other RNA
tcaaggaagatggcatttct

SEQ ID NO: 1326 - RNA, 20 nt, synthetic construct
  misc_feature 1..20: note = Description of Artificial Sequence: Synthetic oligonucleotide
  source 1..20: mol_type = other RNA
tcaaggaagatggcatttct

SEQ ID NO: 1327 - RNA, 20 nt, synthetic construct
  misc_feature 1..20: note = Description of Artificial Sequence: Synthetic oligonucleotide
  source 1..20: mol_type = other RNA
tcaaggaagatggcatttct

SEQ ID NO: 1328 - RNA, 20 nt, synthetic construct
  misc_feature 1..20: note = Description of Artificial Sequence: Synthetic oligonucleotide
  source 1..20: mol_type = other RNA
tcaaggaagatggcatttct

SEQ ID NO: 1329 - RNA, 20 nt, synthetic construct
  misc_feature 1..20: note = Description of Artificial Sequence: Synthetic oligonucleotide
  source 1..20: mol_type = other RNA
tcaaggaagatggcatttct

SEQ ID NO: 1330 - RNA, 20 nt, synthetic construct
  misc_feature 1..20: note = Description of Artificial Sequence: Synthetic oligonucleotide
  source 1..20: mol_type = other RNA
tcaaggaagatggcatttct

SEQ ID NO: 1331 - RNA, 20 nt, synthetic construct
  misc_feature 1..20: note = Description of Artificial Sequence: Synthetic oligonucleotide
  source 1..20: mol_type = other RNA
tcaaggaagatggcatttct

SEQ ID NO: 1332 - RNA, 20 nt, synthetic construct
  misc_feature 1..20: note = Description of Artificial Sequence: Synthetic oligonucleotide
  source 1..20: mol_type = other RNA
tcaaggaagatggcatttct

SEQ ID NO: 1333 - RNA, 20 nt, synthetic construct
  misc_feature 1..20: note = Description of Artificial Sequence: Synthetic oligonucleotide
  source 1..20: mol_type = other RNA
tcaaggaagatggcatttct

SEQ ID NO: 1334 - RNA, 20 nt, synthetic construct
  misc_feature 1..20: note = Description of Artificial Sequence: Synthetic oligonucleotide
  source 1..20: mol_type = other RNA
tcaaggaagatggcatttct

SEQ ID NO: 1335 - RNA, 20 nt, synthetic construct
  misc_feature 1..20: note = Description of Artificial Sequence: Synthetic oligonucleotide
  source 1..20: mol_type = other RNA
tcaaggaagatggcatttct

SEQ ID NO: 1336 - RNA, 20 nt, synthetic construct
  misc_feature 1..20: note = Description of Artificial Sequence: Synthetic oligonucleotide
  source 1..20: mol_type = other RNA
tcaaggaagatggcatttct

SEQ ID NO: 1337 - RNA, 20 nt, synthetic construct
  misc_feature 1..20: note = Description of Artificial Sequence: Synthetic oligonucleotide
  source 1..20: mol_type = other RNA
tcaaggaagatggcatttct

SEQ ID NO: 1338 - RNA, 20 nt, synthetic construct
  misc_feature 1..20: note = Description of Artificial Sequence: Synthetic oligonucleotide
  source 1..20: mol_type = other RNA
tcaaggaagatggcatttct

SEQ ID NO: 1339 - RNA, 20 nt, synthetic construct
  misc_feature 1..20: note = Description of Artificial Sequence: Synthetic oligonucleotide
  source 1..20: mol_type = other RNA
tcaaggaagatggcatttct

SEQ ID NO: 1340 - RNA, 20 nt, synthetic construct
  misc_feature 1..20: note = Description of Artificial Sequence: Synthetic oligonucleotide
  source 1..20: mol_type = other RNA
tcaaggaagatggcatttct

SEQ ID NO: 1341 - RNA, 20 nt, synthetic construct
  misc_feature 1..20: note = Description of Artificial Sequence: Synthetic oligonucleotide
  source 1..20: mol_type = other RNA
tcaaggaagatggcatttct

SEQ ID NO: 1342 - RNA, 20 nt, synthetic construct
  misc_feature 1..20: note = Description of Artificial Sequence: Synthetic oligonucleotide
  source 1..20: mol_type = other RNA
tcaaggaagatggcatttct

SEQ ID NO: 1343 - RNA, 20 nt, synthetic construct
  misc_feature 1..20: note = Description of Artificial Sequence: Synthetic oligonucleotide
  source 1..20: mol_type = other RNA
tcaaggaagatggcatttct

SEQ ID NO: 1344 - RNA, 20 nt, synthetic construct
  misc_feature 1..20: note = Description of Artificial Sequence: Synthetic oligonucleotide
  source 1..20: mol_type = other RNA
tcaaggaagatggcatttct

SEQ ID NO: 1345 - RNA, 20 nt, synthetic construct
  misc_feature 1..20: note = Description of Artificial Sequence: Synthetic oligonucleotide
  source 1..20: mol_type = other RNA
tcaaggaagatggcatttct

SEQ ID NO: 1346 - RNA, 20 nt, synthetic construct
  misc_feature 1..20: note = Description of Artificial Sequence: Synthetic oligonucleotide
  source 1..20: mol_type = other RNA
tcaaggaagatggcatttct

SEQ ID NO: 1347 - RNA, 20 nt, synthetic construct
  misc_feature 1..20: note = Description of Artificial Sequence: Synthetic oligonucleotide
  source 1..20: mol_type = other RNA
tcaaggaagatggcatttct

SEQ ID NO: 1348 - RNA, 20 nt, synthetic construct
  misc_feature 1..20: note = Description of Artificial Sequence: Synthetic oligonucleotide
  source 1..20: mol_type = other RNA
tcaaggaagatggcatttct

SEQ ID NO: 1349 - RNA, 20 nt, synthetic construct
  misc_feature 1..20: note = Description of Artificial Sequence: Synthetic oligonucleotide
  source 1..20: mol_type = other RNA
tcaaggaagatggcatttct

SEQ ID NO: 1350 - RNA, 20 nt, synthetic construct
  misc_feature 1..20: note = Description of Artificial Sequence: Synthetic oligonucleotide
  source 1..20: mol_type = other RNA
tcaaggaagatggcatttct

SEQ ID NO: 1351 - RNA, 20 nt, synthetic construct
  misc_feature 1..20: note = Description of Artificial Sequence: Synthetic oligonucleotide
  source 1..20: mol_type = other RNA
tcaaggaagatggcatttct

SEQ ID NO: 1352 - RNA, 20 nt, synthetic construct
  misc_feature 1..20: note = Description of Artificial Sequence: Synthetic oligonucleotide
  source 1..20: mol_type = other RNA
tcaaggaagatggcatttct

SEQ ID NO: 1353 - RNA, 20 nt, synthetic construct
  misc_feature 1..20: note = Description of Artificial Sequence: Synthetic oligonucleotide
  source 1..20: mol_type = other RNA
tcaaggaagatggcatttct

SEQ ID NO: 1354 - RNA, 20 nt, synthetic construct
  misc_feature 1..20: note = Description of Artificial Sequence: Synthetic oligonucleotide
  source 1..20: mol_type = other RNA
tcaaggaagatggcatttct

SEQ ID NO: 1355 - RNA, 20 nt, synthetic construct
  misc_feature 1..20: note = Description of Artificial Sequence: Synthetic oligonucleotide
  source 1..20: mol_type = other RNA
tcaaggaagatggcatttct

SEQ ID NO: 1356 - RNA, 20 nt, synthetic construct
  misc_feature 1..20: note = Description of Artificial Sequence: Synthetic oligonucleotide
  source 1..20: mol_type = other RNA
tcaaggaagatggcatttct

SEQ ID NO: 1357 - RNA, 20 nt, synthetic construct
  misc_feature 1..20: note = Description of Artificial Sequence: Synthetic oligonucleotide
  source 1..20: mol_type = other RNA
tcaaggaagatggcatttct

SEQ ID NO: 1358 - RNA, 20 nt, synthetic construct
  misc_feature 1..20: note = Description of Artificial Sequence: Synthetic oligonucleotide
  source 1..20: mol_type = other RNA
tcaaggaagatggcatttct

SEQ ID NO: 1359 - RNA, 20 nt, synthetic construct
  misc_feature 1..20: note = Description of Artificial Sequence: Synthetic oligonucleotide
  source 1..20: mol_type = other RNA
tcaaggaagatggcatttct

SEQ ID NO: 1360 - RNA, 20 nt, synthetic construct
  misc_feature 1..20: note = Description of Artificial Sequence: Synthetic oligonucleotide
  source 1..20: mol_type = other RNA
tcaaggaagatggcatttct

SEQ ID NO: 1361 - RNA, 20 nt, synthetic construct
  misc_feature 1..20: note = Description of Artificial Sequence: Synthetic oligonucleotide
  source 1..20: mol_type = other RNA
tcaaggaagatggcatttct

SEQ ID NO: 1362 - RNA, 20 nt, synthetic construct
  misc_feature 1..20: note = Description of Artificial Sequence: Synthetic oligonucleotide
  source 1..20: mol_type = other RNA
tcaaggaagatggcatttct

SEQ ID NO: 1363 - RNA, 20 nt, synthetic construct
  misc_feature 1..20: note = Description of Artificial Sequence: Synthetic oligonucleotide
  source 1..20: mol_type = other RNA
tcaaggaagatggcatttct

SEQ ID NO: 1364 - RNA, 20 nt, synthetic construct
  misc_feature 1..20: note = Description of Artificial Sequence: Synthetic oligonucleotide
  source 1..20: mol_type = other RNA
tcaaggaagatggcatttct

SEQ ID NO: 1365 - RNA, 20 nt, synthetic construct
  misc_feature 1..20: note = Description of Artificial Sequence: Synthetic oligonucleotide
  source 1..20: mol_type = other RNA
tcaaggaagatggcatttct

SEQ ID NO: 1366 - RNA, 20 nt, synthetic construct
  misc_feature 1..20: note = Description of Artificial Sequence: Synthetic oligonucleotide
  source 1..20: mol_type = other RNA
tcaaggaagatggcatttct

SEQ ID NO: 1367 - RNA, 20 nt, synthetic construct
  misc_feature 1..20: note = Description of Artificial Sequence: Synthetic oligonucleotide
  source 1..20: mol_type = other RNA
tcaaggaagatggcatttct

SEQ ID NO: 1368 - RNA, 20 nt, synthetic construct
  misc_feature 1..20: note = Description of Artificial Sequence: Synthetic oligonucleotide
  source 1..20: mol_type = other RNA
tcaaggaagatggcatttct

SEQ ID NO: 1369 - RNA, 20 nt, synthetic construct
  misc_feature 1..20: note = Description of Artificial Sequence: Synthetic oligonucleotide
  source 1..20: mol_type = other RNA
tcaaggaagatggcatttct

SEQ ID NO: 1370 - RNA, 20 nt, synthetic construct
  misc_feature 1..20: note = Description of Artificial Sequence: Synthetic oligonucleotide
  source 1..20: mol_type = other RNA
tcaaggaagatggcatttct

SEQ ID NO: 1371 - RNA, 20 nt, synthetic construct
  misc_feature 1..20: note = Description of Artificial Sequence: Synthetic oligonucleotide
  source 1..20: mol_type = other RNA
tcaaggaagatggcatttct

SEQ ID NO: 1372 - RNA, 20 nt, synthetic construct
  misc_feature 1..20: note = Description of Artificial Sequence: Synthetic oligonucleotide
  source 1..20: mol_type = other RNA
tcaaggaagatggcatttct

SEQ ID NO: 1373 - RNA, 20 nt, synthetic construct
  misc_feature 1..20: note = Description of Artificial Sequence: Synthetic oligonucleotide
  source 1..20: mol_type = other RNA
tcaaggaagatggcatttct

SEQ ID NO: 1374 - RNA, 20 nt, synthetic construct
  misc_feature 1..20: note = Description of Artificial Sequence: Synthetic oligonucleotide
  source 1..20: mol_type = other RNA
tcaaggaagatggcatttct

SEQ ID NO: 1375 - RNA, 20 nt, synthetic construct
  misc_feature 1..20: note = Description of Artificial Sequence: Synthetic oligonucleotide
  source 1..20: mol_type = other RNA
tcaaggaagatggcatttct

SEQ ID NO: 1376 - RNA, 20 nt, synthetic construct
  misc_feature 1..20: note = Description of Artificial Sequence: Synthetic oligonucleotide
  source 1..20: mol_type = other RNA
tcaaggaagatggcatttct

SEQ ID NO: 1377 - RNA, 20 nt, synthetic construct
  misc_feature 1..20: note = Description of Artificial Sequence: Synthetic oligonucleotide
  source 1..20: mol_type = other RNA
tcaaggaagatggcatttct

SEQ ID NO: 1378 - RNA, 20 nt, synthetic construct
  misc_feature 1..20: note = Description of Artificial Sequence: Synthetic oligonucleotide
  source 1..20: mol_type = other RNA
tcaaggaagatggcatttct

SEQ ID NO: 1379 - RNA, 20 nt, synthetic construct
  misc_feature 1..20: note = Description of Artificial Sequence: Synthetic oligonucleotide
  source 1..20: mol_type = other RNA
tcaaggaagatggcatttct

SEQ ID NO: 1380 - RNA, 20 nt, synthetic construct
  misc_feature 1..20: note = Description of Artificial Sequence: Synthetic oligonucleotide
  source 1..20: mol_type = other RNA
tcaaggaagatggcatttct

SEQ ID NO: 1381 - RNA, 20 nt, synthetic construct
  misc_feature 1..20: note = Description of Artificial Sequence: Synthetic oligonucleotide
  source 1..20: mol_type = other RNA
tcaaggaagatggcatttct

SEQ ID NO: 1382 - RNA, 20 nt, synthetic construct
  misc_feature 1..20: note = Description of Artificial Sequence: Synthetic oligonucleotide
  source 1..20: mol_type = other RNA
tcaaggaagatggcatttct

SEQ ID NO: 1383 - RNA, 20 nt, synthetic construct
  misc_feature 1..20: note = Description of Artificial Sequence: Synthetic oligonucleotide
  source 1..20: mol_type = other RNA
tcaaggaagatggcatttct

SEQ ID NO: 1384 - RNA, 20 nt, synthetic construct
  misc_feature 1..20: note = Description of Artificial Sequence: Synthetic oligonucleotide
  source 1..20: mol_type = other RNA
tcaaggaagatggcatttct

SEQ ID NO: 1385 - RNA, 20 nt, synthetic construct
  misc_feature 1..20: note = Description of Artificial Sequence: Synthetic oligonucleotide
  source 1..20: mol_type = other RNA
tcaaggaagatggcatttct

SEQ ID NO: 1386 - RNA, 20 nt, synthetic construct
  misc_feature 1..20: note = Description of Artificial Sequence: Synthetic oligonucleotide
  source 1..20: mol_type = other RNA
tcaaggaagatggcatttct

SEQ ID NO: 1387 - RNA, 20 nt, synthetic construct
  misc_feature 1..20: note = Description of Artificial Sequence: Synthetic oligonucleotide
  source 1..20: mol_type = other RNA
tcaaggaagatggcatttct

SEQ ID NO: 1388 - RNA, 20 nt, synthetic construct
  misc_feature 1..20: note = Description of Artificial Sequence: Synthetic oligonucleotide
  source 1..20: mol_type = other RNA
tcaaggaagatggcatttct

SEQ ID NO: 1389 - RNA, 20 nt, synthetic construct
  misc_feature 1..20: note = Description of Artificial Sequence: Synthetic oligonucleotide
  source 1..20: mol_type = other RNA
tcaaggaagatggcatttct

SEQ ID NO: 1390 - RNA, 20 nt, synthetic construct
  misc_feature 1..20: note = Description of Artificial Sequence: Synthetic oligonucleotide
  source 1..20: mol_type = other RNA
tcaaggaagatggcatttct

SEQ ID NO: 1391 - RNA, 20 nt, synthetic construct
  misc_feature 1..20: note = Description of Artificial Sequence: Synthetic oligonucleotide
  source 1..20: mol_type = other RNA
tcaaggaagatggcatttct

SEQ ID NO: 1392 - RNA, 20 nt, synthetic construct
  misc_feature 1..20: note = Description of Artificial Sequence: Synthetic oligonucleotide
  source 1..20: mol_type = other RNA
tcaaggaagatggcatttct

SEQ ID NO: 1393 - RNA, 20 nt, synthetic construct
  misc_feature 1..20: note = Description of Artificial Sequence: Synthetic oligonucleotide
  source 1..20: mol_type = other RNA
tcaaggaagatggcatttct

SEQ ID NO: 1394 - RNA, 20 nt, synthetic construct
  misc_feature 1..20: note = Description of Artificial Sequence: Synthetic oligonucleotide
  source 1..20: mol_type = other RNA
tcaaggaagatggcatttct

SEQ ID NO: 1395 - RNA, 20 nt, synthetic construct
  misc_feature 1..20: note = Description of Artificial Sequence: Synthetic oligonucleotide
  source 1..20: mol_type = other RNA
tcaaggaagatggcatttct

SEQ ID NO: 1396 - RNA, 20 nt, synthetic construct
  misc_feature 1..20: note = Description of Artificial Sequence: Synthetic oligonucleotide
  source 1..20: mol_type = other RNA
tcaaggaagatggcatttct

SEQ ID NO: 1397 - RNA, 20 nt, synthetic construct
  misc_feature 1..20: note = Description of Artificial Sequence: Synthetic oligonucleotide
  source 1..20: mol_type = other RNA
tcaaggaagatggcatttct

SEQ ID NO: 1398 - RNA, 20 nt, synthetic construct
  misc_feature 1..20: note = Description of Artificial Sequence: Synthetic oligonucleotide
  source 1..20: mol_type = other RNA
tcaaggaagatggcatttct

SEQ ID NO: 1399 - RNA, 20 nt, synthetic construct
  misc_feature 1..20: note = Description of Artificial Sequence: Synthetic oligonucleotide
  source 1..20: mol_type = other RNA
tcaaggaagatggcatttct

SEQ ID NO: 1400 - RNA, 20 nt, synthetic construct
  misc_feature 1..20: note = Description of Artificial Sequence: Synthetic oligonucleotide
  source 1..20: mol_type = other RNA
tcaaggaagatggcatttct

SEQ ID NO: 1401 - RNA, 20 nt, synthetic construct
  misc_feature 1..20: note = Description of Artificial Sequence: Synthetic oligonucleotide
  source 1..20: mol_type = other RNA
tcaaggaagatggcatttct

SEQ ID NO: 1402 - RNA, 20 nt, synthetic construct
  misc_feature 1..20: note = Description of Artificial Sequence: Synthetic oligonucleotide
  source 1..20: mol_type = other RNA
tcaaggaagatggcatttct

SEQ ID NO: 1403 - RNA, 20 nt, synthetic construct
  misc_feature 1..20: note = Description of Artificial Sequence: Synthetic oligonucleotide
  source 1..20: mol_type = other RNA
tcaaggaagatggcatttct

SEQ ID NO: 1404 - RNA, 20 nt, synthetic construct
  misc_feature 1..20: note = Description of Artificial Sequence: Synthetic oligonucleotide
  source 1..20: mol_type = other RNA
tcaaggaagatggcatttct

SEQ ID NO: 1405 - RNA, 20 nt, synthetic construct
  misc_feature 1..20: note = Description of Artificial Sequence: Synthetic oligonucleotide
  source 1..20: mol_type = other RNA
tcaaggaagatggcatttct

SEQ ID NO: 1406 - RNA, 20 nt, synthetic construct
  misc_feature 1..20: note = Description of Artificial Sequence: Synthetic oligonucleotide
  source 1..20: mol_type = other RNA
tcaaggaagatggcatttct

SEQ ID NO: 1407 - RNA, 20 nt, synthetic construct
  misc_feature 1..20: note = Description of Artificial Sequence: Synthetic oligonucleotide
  source 1..20: mol_type = other RNA
tcaaggaagatggcatttct

SEQ ID NO: 1408 - RNA, 20 nt, synthetic construct
  misc_feature 1..20: note = Description of Artificial Sequence: Synthetic oligonucleotide
  source 1..20: mol_type = other RNA
tcaaggaagatggcatttct

SEQ ID NO: 1409 - RNA, 20 nt, synthetic construct
  misc_feature 1..20: note = Description of Artificial Sequence: Synthetic oligonucleotide
  source 1..20: mol_type = other RNA
tcaaggaagatggcatttct

SEQ ID NO: 1410 - RNA, 20 nt, synthetic construct
  misc_feature 1..20: note = Description of Artificial Sequence: Synthetic oligonucleotide
  source 1..20: mol_type = other RNA
tcaaggaagatggcatttct

SEQ ID NO: 1411 - RNA, 20 nt, synthetic construct
  misc_feature 1..20: note = Description of Artificial Sequence: Synthetic oligonucleotide
  source 1..20: mol_type = other RNA
tcaaggaagatggcatttct

SEQ ID NO: 1412 - RNA, 20 nt, synthetic construct
  misc_feature 1..20: note = Description of Artificial Sequence: Synthetic oligonucleotide
  source 1..20: mol_type = other RNA
tcaaggaagatggcatttct

SEQ ID NO: 1413 - RNA, 20 nt, synthetic construct
  misc_feature 1..20: note = Description of Artificial Sequence: Synthetic oligonucleotide
  source 1..20: mol_type = other RNA
tcaaggaagatggcatttct

SEQ ID NO: 1414 - RNA, 20 nt, synthetic construct
  misc_feature 1..20: note = Description of Artificial Sequence: Synthetic oligonucleotide
  source 1..20: mol_type = other RNA
tcaaggaagatggcatttct

SEQ ID NO: 1415 - RNA, 20 nt, synthetic construct
  misc_feature 1..20: note = Description of Artificial Sequence: Synthetic oligonucleotide
  source 1..20: mol_type = other RNA
tcaaggaagatggcatttct

SEQ ID NO: 1416 - RNA, 20 nt, synthetic construct
  misc_feature 1..20: note = Description of Artificial Sequence: Synthetic oligonucleotide
  source 1..20: mol_type = other RNA
tcaaggaagatggcatttct

SEQ ID NO: 1417 - RNA, 20 nt, synthetic construct
  misc_feature 1..20: note = Description of Artificial Sequence: Synthetic oligonucleotide
  source 1..20: mol_type = other RNA
tcaaggaagatggcatttct

SEQ ID NO: 1418 - RNA, 20 nt, synthetic construct
  misc_feature 1..20: note = Description of Artificial Sequence: Synthetic oligonucleotide
  source 1..20: mol_type = other RNA
tcaaggaagatggcatttct

SEQ ID NO: 1419 - RNA, 20 nt, synthetic construct
  misc_feature 1..20: note = Description of Artificial Sequence: Synthetic oligonucleotide
  source 1..20: mol_type = other RNA
tcaaggaagatggcatttct

SEQ ID NO: 1420 - RNA, 20 nt, synthetic construct
  misc_feature 1..20: note = Description of Artificial Sequence: Synthetic oligonucleotide
  source 1..20: mol_type = other RNA
tcaaggaagatggcatttct

SEQ ID NO: 1421 - RNA, 20 nt, synthetic construct
  misc_feature 1..20: note = Description of Artificial Sequence: Synthetic oligonucleotide
  source 1..20: mol_type = other RNA
tcaaggaagatggcatttct

SEQ ID NO: 1422 - RNA, 20 nt, synthetic construct
  misc_feature 1..20: note = Description of Artificial Sequence: Synthetic oligonucleotide
  source 1..20: mol_type = other RNA
tcaaggaagatggcatttct

SEQ ID NO: 1423 - RNA, 20 nt, synthetic construct
  misc_feature 1..20: note = Description of Artificial Sequence: Synthetic oligonucleotide
  source 1..20: mol_type = other RNA
tcaaggaagatggcatttct

SEQ ID NO: 1424 - RNA, 20 nt, synthetic construct
  misc_feature 1..20: note = Description of Artificial Sequence: Synthetic oligonucleotide
  source 1..20: mol_type = other RNA
tcaaggaagatggcatttct

SEQ ID NO: 1425 - RNA, 20 nt, synthetic construct
  misc_feature 1..20: note = Description of Artificial Sequence: Synthetic oligonucleotide
  source 1..20: mol_type = other RNA
tcaaggaagatggcatttct

SEQ ID NO: 1426 - RNA, 20 nt, synthetic construct
  misc_feature 1..20: note = Description of Artificial Sequence: Synthetic oligonucleotide
  source 1..20: mol_type = other RNA
tcaaggaagatggcatttct

SEQ ID NO: 1427 - RNA, 20 nt, synthetic construct
  misc_feature 1..20: note = Description of Artificial Sequence: Synthetic oligonucleotide
  source 1..20: mol_type = other RNA
tcaaggaagatggcatttct

SEQ ID NO: 1428 - RNA, 20 nt, synthetic construct
  misc_feature 1..20: note = Description of Artificial Sequence: Synthetic oligonucleotide
  source 1..20: mol_type = other RNA
tcaaggaagatggcatttct

SEQ ID NO: 1429 - RNA, 20 nt, synthetic construct
  misc_feature 1..20: note = Description of Artificial Sequence: Synthetic oligonucleotide
  source 1..20: mol_type = other RNA
tcaaggaagatggcatttct

SEQ ID NO: 1430 - RNA, 20 nt, synthetic construct
  misc_feature 1..20: note = Description of Artificial Sequence: Synthetic oligonucleotide
  source 1..20: mol_type = other RNA
tcaaggaagatggcatttct

SEQ ID NO: 1431 - RNA, 20 nt, synthetic construct
  misc_feature 1..20: note = Description of Artificial Sequence: Synthetic oligonucleotide
  source 1..20: mol_type = other RNA
tcaaggaagatggcatttct

SEQ ID NO: 1432 - RNA, 20 nt, synthetic construct
  misc_feature 1..20: note = Description of Artificial Sequence: Synthetic oligonucleotide
  source 1..20: mol_type = other RNA
tcaaggaagatggcatttct

SEQ ID NO: 1433 - RNA, 20 nt, synthetic construct
  misc_feature 1..20: note = Description of Artificial Sequence: Synthetic oligonucleotide
  source 1..20: mol_type = other RNA
tcaaggaagatggcatttct

SEQ ID NO: 1434 - RNA, 20 nt, synthetic construct
  misc_feature 1..20: note = Description of Artificial Sequence: Synthetic oligonucleotide
  source 1..20: mol_type = other RNA
tcaaggaagatggcatttct

SEQ ID NO: 1435 - RNA, 20 nt, synthetic construct
  misc_feature 1..20: note = Description of Artificial Sequence: Synthetic oligonucleotide
  source 1..20: mol_type = other RNA
tcaaggaagatggcatttct

SEQ ID NO: 1436 - RNA, 20 nt, synthetic construct
  misc_feature 1..20: note = Description of Artificial Sequence: Synthetic oligonucleotide
  source 1..20: mol_type = other RNA
tcaaggaagatggcatttct

SEQ ID NO: 1437 - RNA, 20 nt, synthetic construct
  misc_feature 1..20: note = Description of Artificial Sequence: Synthetic oligonucleotide
  source 1..20: mol_type = other RNA
tcaaggaagatggcatttct

SEQ ID NO: 1438 - RNA, 20 nt, synthetic construct
  misc_feature 1..20: note = Description of Artificial Sequence: Synthetic oligonucleotide
  source 1..20: mol_type = other RNA
tcaaggaagatggcatttct

SEQ ID NO: 1439 - RNA, 20 nt, synthetic construct
  misc_feature 1..20: note = Description of Artificial Sequence: Synthetic oligonucleotide
  source 1..20: mol_type = other RNA
tcaaggaagatggcatttct

SEQ ID NO: 1440 - RNA, 20 nt, synthetic construct
  misc_feature 1..20: note = Description of Artificial Sequence: Synthetic oligonucleotide
  source 1..20: mol_type = other RNA
tcaaggaagatggcatttct

SEQ ID NO: 1441 - RNA, 20 nt, synthetic construct
  misc_feature 1..20: note = Description of Artificial Sequence: Synthetic oligonucleotide
  source 1..20: mol_type = other RNA
tcaaggaagatggcatttct

SEQ ID NO: 1442 - RNA, 20 nt, synthetic construct
  misc_feature 1..20: note = Description of Artificial Sequence: Synthetic oligonucleotide
  source 1..20: mol_type = other RNA
tcaaggaagatggcatttct

SEQ ID NO: 1443 - RNA, 20 nt, synthetic construct
  misc_feature 1..20: note = Description of Artificial Sequence: Synthetic oligonucleotide
  source 1..20: mol_type = other RNA
tcaaggaagatggcatttct

SEQ ID NO: 1444 - RNA, 20 nt, synthetic construct
  misc_feature 1..20: note = Description of Artificial Sequence: Synthetic oligonucleotide
  source 1..20: mol_type = other RNA
tcaaggaagatggcatttct

SEQ ID NO: 1445 - RNA, 20 nt, synthetic construct
  misc_feature 1..20: note = Description of Artificial Sequence: Synthetic oligonucleotide
  source 1..20: mol_type = other RNA
tcaaggaagatggcatttct

SEQ ID NO: 1446 - RNA, 20 nt, synthetic construct
  misc_feature 1..20: note = Description of Artificial Sequence: Synthetic oligonucleotide
  source 1..20: mol_type = other RNA
tcaaggaagatggcatttct

SEQ ID NO: 1447 - RNA, 20 nt, synthetic construct
  misc_feature 1..20: note = Description of Artificial Sequence: Synthetic oligonucleotide
  source 1..20: mol_type = other RNA
tcaaggaagatggcatttct

SEQ ID NO: 1448 - RNA, 20 nt, synthetic construct
  misc_feature 1..20: note = Description of Artificial Sequence: Synthetic oligonucleotide
  source 1..20: mol_type = other RNA
tcaaggaagatggcatttct

SEQ ID NO: 1449 - RNA, 20 nt, synthetic construct
  misc_feature 1..20: note = Description of Artificial Sequence: Synthetic oligonucleotide
  source 1..20: mol_type = other RNA
tcaaggaagatggcatttct

SEQ ID NO: 1450 - RNA, 20 nt, synthetic construct
  misc_feature 1..20: note = Description of Artificial Sequence: Synthetic oligonucleotide
  source 1..20: mol_type = other RNA
tcaaggaagatggcatttct

SEQ ID NO: 1451 - RNA, 20 nt, synthetic construct
  misc_feature 1..20: note = Description of Artificial Sequence: Synthetic oligonucleotide
  source 1..20: mol_type = other RNA
tcaaggaagatggcatttct

SEQ ID NO: 1452 - RNA, 20 nt, synthetic construct
  misc_feature 1..20: note = Description of Artificial Sequence: Synthetic oligonucleotide
  source 1..20: mol_type = other RNA
tcaaggaagatggcatttct

SEQ ID NO: 1453 - RNA, 20 nt, synthetic construct
  misc_feature 1..20: note = Description of Artificial Sequence: Synthetic oligonucleotide
  source 1..20: mol_type = other RNA
tcaaggaagatggcatttct

SEQ ID NO: 1454 - RNA, 20 nt, synthetic construct
  misc_feature 1..20: note = Description of Artificial Sequence: Synthetic oligonucleotide
  source 1..20: mol_type = other RNA
tcaaggaagatggcatttct

SEQ ID NO: 1455 - RNA, 20 nt, synthetic construct
  misc_feature 1..20: note = Description of Artificial Sequence: Synthetic oligonucleotide
  source 1..20: mol_type = other RNA
tcaaggaagatggcatttct

SEQ ID NO: 1456 - RNA, 20 nt, synthetic construct
  misc_feature 1..20: note = Description of Artificial Sequence: Synthetic oligonucleotide
  source 1..20: mol_type = other RNA
tcaaggaagatggcatttct

SEQ ID NO: 1457 - RNA, 20 nt, synthetic construct
  misc_feature 1..20: note = Description of Artificial Sequence: Synthetic oligonucleotide
  source 1..20: mol_type = other RNA
tcaaggaagatggcatttct

SEQ ID NO: 1458 - RNA, 20 nt, synthetic construct
  misc_feature 1..20: note = Description of Artificial Sequence: Synthetic oligonucleotide
  source 1..20: mol_type = other RNA
tcaaggaagatggcatttct

SEQ ID NO: 1459 - RNA, 20 nt, synthetic construct
  misc_feature 1..20: note = Description of Artificial Sequence: Synthetic oligonucleotide
  source 1..20: mol_type = other RNA
tcaaggaagatggcatttct

SEQ ID NO: 1460 - RNA, 20 nt, synthetic construct
  misc_feature 1..20: note = Description of Artificial Sequence: Synthetic oligonucleotide
  source 1..20: mol_type = other RNA
tcaaggaagatggcatttct

SEQ ID NO: 1461 - RNA, 20 nt, synthetic construct
  misc_feature 1..20: note = Description of Artificial Sequence: Synthetic oligonucleotide
  source 1..20: mol_type = other RNA
tcaaggaagatggcatttct

SEQ ID NO: 1462 - RNA, 20 nt, synthetic construct
  misc_feature 1..20: note = Description of Artificial Sequence: Synthetic oligonucleotide
  source 1..20: mol_type = other RNA
tcaaggaagatggcatttct

SEQ ID NO: 1463 - RNA, 20 nt, synthetic construct
  misc_feature 1..20: note = Description of Artificial Sequence: Synthetic oligonucleotide
  source 1..20: mol_type = other RNA
tcaaggaagatggcatttct

SEQ ID NO: 1464 - RNA, 20 nt, synthetic construct
  misc_feature 1..20: note = Description of Artificial Sequence: Synthetic oligonucleotide
  source 1..20: mol_type = other RNA
tcaaggaagatggcatttct

SEQ ID NO: 1465 - RNA, 20 nt, synthetic construct
  misc_feature 1..20: note = Description of Artificial Sequence: Synthetic oligonucleotide
  source 1..20: mol_type = other RNA
tcaaggaagatggcatttct

SEQ ID NO: 1466 - RNA, 20 nt, synthetic construct
  misc_feature 1..20: note = Description of Artificial Sequence: Synthetic oligonucleotide
  source 1..20: mol_type = other RNA
tcaaggaagatggcatttct

SEQ ID NO: 1467 - RNA, 20 nt, synthetic construct
  misc_feature 1..20: note = Description of Artificial Sequence: Synthetic oligonucleotide
  source 1..20: mol_type = other RNA
tcaaggaagatggcatttct

SEQ ID NO: 1468 - RNA, 20 nt, synthetic construct
  misc_feature 1..20: note = Description of Artificial Sequence: Synthetic oligonucleotide
  source 1..20: mol_type = other RNA
tcaaggaagatggcatttct

SEQ ID NO: 1469 - RNA, 20 nt, synthetic construct
  misc_feature 1..20: note = Description of Artificial Sequence: Synthetic oligonucleotide
  source 1..20: mol_type = other RNA
tcaaggaagatggcatttct

SEQ ID NO: 1470 - RNA, 20 nt, synthetic construct
  misc_feature 1..20: note = Description of Artificial Sequence: Synthetic oligonucleotide
  source 1..20: mol_type = other RNA
tcaaggaagatggcatttct

SEQ ID NO: 1471 - RNA, 20 nt, synthetic construct
  misc_feature 1..20: note = Description of Artificial Sequence: Synthetic oligonucleotide
  source 1..20: mol_type = other RNA
tcaaggaagatggcatttct

SEQ ID NO: 1472 - RNA, 20 nt, synthetic construct
  misc_feature 1..20: note = Description of Artificial Sequence: Synthetic oligonucleotide
  source 1..20: mol_type = other RNA
tcaaggaagatggcatttct

SEQ ID NO: 1473 - RNA, 20 nt, synthetic construct
  misc_feature 1..20: note = Description of Artificial Sequence: Synthetic oligonucleotide
  source 1..20: mol_type = other RNA
tcaaggaagatggcatttct

SEQ ID NO: 1474 - RNA, 20 nt, synthetic construct
  misc_feature 1..20: note = Description of Artificial Sequence: Synthetic oligonucleotide
  source 1..20: mol_type = other RNA
tcaaggaagatggcatttct

SEQ ID NO: 1475 - RNA, 20 nt, synthetic construct
  misc_feature 1..20: note = Description of Artificial Sequence: Synthetic oligonucleotide
  source 1..20: mol_type = other RNA
tcaaggaagatggcatttct

SEQ ID NO: 1476 - RNA, 20 nt, synthetic construct
  misc_feature 1..20: note = Description of Artificial Sequence: Synthetic oligonucleotide
  source 1..20: mol_type = other RNA
tcaaggaagatggcatttct

SEQ ID NO: 1477 - RNA, 20 nt, synthetic construct
  misc_feature 1..20: note = Description of Artificial Sequence: Synthetic oligonucleotide
  source 1..20: mol_type = other RNA
tcaaggaagatggcatttct

SEQ ID NO: 1478 - RNA, 20 nt, synthetic construct
  misc_feature 1..20: note = Description of Artificial Sequence: Synthetic oligonucleotide
  source 1..20: mol_type = other RNA
tcaaggaagatggcatttct

SEQ ID NO: 1479 - RNA, 20 nt, synthetic construct
  misc_feature 1..20: note = Description of Artificial Sequence: Synthetic oligonucleotide
  source 1..20: mol_type = other RNA
tcaaggaagatggcatttct

SEQ ID NO: 1480 - RNA, 20 nt, synthetic construct
  misc_feature 1..20: note = Description of Artificial Sequence: Synthetic oligonucleotide
  source 1..20: mol_type = other RNA
tcaaggaagatggcatttct

SEQ ID NO: 1481 - RNA, 20 nt, synthetic construct
  misc_feature 1..20: note = Description of Artificial Sequence: Synthetic oligonucleotide
  source 1..20: mol_type = other RNA
tcaaggaagatggcatttct

SEQ ID NO: 1482 - RNA, 20 nt, synthetic construct
  misc_feature 1..20: note = Description of Artificial Sequence: Synthetic oligonucleotide
  source 1..20: mol_type = other RNA
tcaaggaagatggcatttct

SEQ ID NO: 1483 - RNA, 20 nt, synthetic construct
  misc_feature 1..20: note = Description of Artificial Sequence: Synthetic oligonucleotide
  source 1..20: mol_type = other RNA
tcaaggaagatggcatttct

SEQ ID NO: 1484 - RNA, 20 nt, synthetic construct
  misc_feature 1..20: note = Description of Artificial Sequence: Synthetic oligonucleotide
  source 1..20: mol_type = other RNA
tcaaggaagatggcatttct

SEQ ID NO: 1485 - RNA, 20 nt, synthetic construct
  misc_feature 1..20: note = Description of Artificial Sequence: Synthetic oligonucleotide
  source 1..20: mol_type = other RNA
tcaaggaagatggcatttct

SEQ ID NO: 1486 - RNA, 20 nt, synthetic construct
  misc_feature 1..20: note = Description of Artificial Sequence: Synthetic oligonucleotide
  source 1..20: mol_type = other RNA
tcaaggaagatggcatttct

SEQ ID NO: 1487 - RNA, 20 nt, synthetic construct
  misc_feature 1..20: note = Description of Artificial Sequence: Synthetic oligonucleotide
  source 1..20: mol_type = other RNA
tcaaggaagatggcatttct

SEQ ID NO: 1488 - RNA, 20 nt, synthetic construct
  misc_feature 1..20: note = Description of Artificial Sequence: Synthetic oligonucleotide
  source 1..20: mol_type = other RNA
tcaaggaagatggcatttct

SEQ ID NO: 1489 - RNA, 20 nt, synthetic construct
  misc_feature 1..20: note = Description of Artificial Sequence: Synthetic oligonucleotide
  source 1..20: mol_type = other RNA
tcaaggaagatggcatttct

SEQ ID NO: 1490 - RNA, 20 nt, synthetic construct
  misc_feature 1..20: note = Description of Artificial Sequence: Synthetic oligonucleotide
  source 1..20: mol_type = other RNA
tcaaggaagatggcatttct

SEQ ID NO: 1491 - RNA, 30 nt, synthetic construct; identical to SEQ ID NO: 739
  misc_feature 1..30: note = Description of Artificial Sequence: Synthetic oligonucleotide
  source 1..30: mol_type = other RNA

SEQ ID NO: 1492 - RNA, 20 nt, synthetic construct
  misc_feature 1..20: note = Description of Artificial Sequence: Synthetic oligonucleotide
  source 1..20: mol_type = other RNA
tcaaggaagatggcatttct

SEQ ID NO: 1493 - RNA, 20 nt, synthetic construct
  misc_feature 1..20: note = Description of Artificial Sequence: Synthetic oligonucleotide
  source 1..20: mol_type = other RNA
tcaaggaagatggcatttct

SEQ ID NO: 1494 - RNA, 20 nt, synthetic construct
  misc_feature 1..20: note = Description of Artificial Sequence: Synthetic oligonucleotide
  source 1..20: mol_type = other RNA
tcaaggaagatggcatttct

SEQ ID NO: 1495 - RNA, 20 nt, synthetic construct
  misc_feature 1..20: note = Description of Artificial Sequence: Synthetic oligonucleotide
  source 1..20: mol_type = other RNA
tcaaggaagatggcatttct

SEQ ID NO: 1496 - RNA, 20 nt, synthetic construct
  misc_feature 1..20: note = Description of Artificial Sequence: Synthetic oligonucleotide
  source 1..20: mol_type = other RNA
ccttccctgaaggttcctcc

SEQ ID NO: 1497 - RNA, 20 nt, synthetic construct
  misc_feature 1..20: note = Description of Artificial Sequence: Synthetic oligonucleotide
  source 1..20: mol_type = other RNA
ccttccctgaaggttcctcc

SEQ ID NO: 1498 - RNA, 20 nt, synthetic construct
  misc_feature 1..20: note = Description of Artificial Sequence: Synthetic oligonucleotide
  source 1..20: mol_type = other RNA
ccttccctgaaggttcctcc

SEQ ID NO: 1499 - RNA, 20 nt, synthetic construct
  misc_feature 1..20: note = Description of Artificial Sequence: Synthetic oligonucleotide
  source 1..20: mol_type = other RNA
ccttccctgaaggttcctcc

SEQ ID NO: 1500 - RNA, 20 nt, synthetic construct
  misc_feature 1..20: note = Description of Artificial Sequence: Synthetic oligonucleotide
  source 1..20: mol_type = other RNA
ccttccctgaaggttcctcc

SEQ ID NO: 1501 - RNA, 20 nt, synthetic construct
  misc_feature 1..20: note = Description of Artificial Sequence: Synthetic oligonucleotide
  source 1..20: mol_type = other RNA
ccttccctgaaggttcctcc

SEQ ID NO: 1502 - RNA, 20 nt, synthetic construct
  misc_feature 1..20: note = Description of Artificial Sequence: Synthetic oligonucleotide
  source 1..20: mol_type = other RNA
tcaaggaagatggcatttct

SEQ ID NO: 1503 - RNA, 20 nt, synthetic construct
  misc_feature 1..20: note = Description of Artificial Sequence: Synthetic oligonucleotide
  source 1..20: mol_type = other RNA
tcaaggaagatggcatttct

SEQ ID NO: 1504 - RNA, 20 nt, synthetic construct
  misc_feature 1..20: note = Description of Artificial Sequence: Synthetic oligonucleotide
  source 1..20: mol_type = other RNA
tcaaggaagatggcatttct

SEQ ID NO: 1505 - RNA, 19 nt, synthetic construct
  misc_feature 1..19: note = Description of Artificial Sequence: Synthetic oligonucleotide
  source 1..19: mol_type = other RNA
tcaaggaagatggcatttc

SEQ ID NO: 1506 - RNA, 18 nt, synthetic construct
  misc_feature 1..18: note = Description of Artificial Sequence: Synthetic oligonucleotide
  source 1..18: mol_type = other RNA
tcaaggaagatggcattt

SEQ ID NO: 1507 - RNA, 19 nt, synthetic construct
  misc_feature 1..19: note = Description of Artificial Sequence: Synthetic oligonucleotide
  source 1..19: mol_type = other RNA
caaggaagatggcatttct

SEQ ID NO: 1508 - RNA, 20 nt, synthetic construct
  misc_feature 1..20: note = Description of Artificial Sequence: Synthetic oligonucleotide
  source 1..20: mol_type = other RNA
ggccaaacctcggcttacct

SEQ ID NO: 1509 - RNA, 20 nt, synthetic construct
  misc_feature 1..20: note = Description of Artificial Sequence: Synthetic oligonucleotide
  source 1..20: mol_type = other RNA
ggccaaacctcggcttacct

SEQ ID NO: 1510 - RNA, 20 nt, synthetic construct
  misc_feature 1..20: note = Description of Artificial Sequence: Synthetic oligonucleotide
  source 1..20: mol_type = other RNA
ttctgtaaggtttttatgtg

SEQ ID NO: 1511 - RNA, 20 nt, synthetic construct
  misc_feature 1..20: note = Description of Artificial Sequence: Synthetic oligonucleotide
  source 1..20: mol_type = other RNA
atttctgtaaggtttttatg

SEQ ID NO: 1512 - RNA, 20 nt, synthetic construct
  misc_feature 1..20: note = Description of Artificial Sequence: Synthetic oligonucleotide
  source 1..20: mol_type = other RNA
ccatttctgtaaggttttta

SEQ ID NO: 1513 - RNA, 20 nt, synthetic construct
  misc_feature 1..20: note = Description of Artificial Sequence: Synthetic oligonucleotide
  source 1..20: mol_type = other RNA
atccatttctgtaaggtttt

SEQ ID NO: 1514 - RNA, 20 nt, synthetic construct
  misc_feature 1..20: note = Description of Artificial Sequence: Synthetic oligonucleotide
  source 1..20: mol_type = other RNA
catccatttctgtaaggttt

SEQ ID NO: 1515 - RNA, 20 nt, synthetic construct
  misc_feature 1..20: note = Description of Artificial Sequence: Synthetic oligonucleotide
  source 1..20: mol_type = other RNA
ccatccatttctgtaaggtt

SEQ ID NO: 1516 - RNA, 20 nt, synthetic construct
  misc_feature 1..20: note = Description of Artificial Sequence: Synthetic oligonucleotide
  source 1..20: mol_type = other RNA
gccatccatttctgtaaggt

SEQ ID NO: 1517 - RNA, 20 nt, synthetic construct
  misc_feature 1..20: note = Description of Artificial Sequence: Synthetic oligonucleotide
  source 1..20: mol_type = other RNA
agccatccatttctgtaagg

SEQ ID NO: 1518 - RNA, 20 nt, synthetic construct
  misc_feature 1..20: note = Description of Artificial Sequence: Synthetic oligonucleotide
  source 1..20: mol_type = other RNA
cagccatccatttctgtaag

SEQ ID NO: 1519 - RNA, 20 nt, synthetic construct
  misc_feature 1..20: note = Description of Artificial Sequence: Synthetic oligonucleotide
  source 1..20: mol_type = other RNA
tcagccatccatttctgtaa

SEQ ID NO: 1520 - RNA, 20 nt, synthetic construct
  misc_feature 1..20: note = Description of Artificial Sequence: Synthetic oligonucleotide
  source 1..20: mol_type = other RNA
ttcagccatccatttctgta

SEQ ID NO: 1521 - RNA, 20 nt, synthetic construct
  misc_feature 1..20: note = Description of Artificial Sequence: Synthetic oligonucleotide
  source 1..20: mol_type = other RNA
cttcagccatccatttctgt

SEQ ID NO: 1522 - RNA, 20 nt, synthetic construct
  misc_feature 1..20: note = Description of Artificial Sequence: Synthetic oligonucleotide
  source 1..20: mol_type = other RNA
acttcagccatccatttctg

SEQ ID NO: 1523 - RNA, 20 nt, synthetic construct
  misc_feature 1..20: note = Description of Artificial Sequence: Synthetic oligonucleotide
  source 1..20: mol_type = other RNA
aacttcagccatccatttct

SEQ ID NO: 1524 - RNA, 20 nt, synthetic construct
  misc_feature 1..20: note = Description of Artificial Sequence: Synthetic oligonucleotide
  source 1..20: mol_type = other RNA
caacttcagccatccatttc

SEQ ID NO: 1525 - RNA, 20 nt, synthetic construct
  misc_feature 1..20: note = Description of Artificial Sequence: Synthetic oligonucleotide
  source 1..20: mol_type = other RNA
tcaacttcagccatccattt

SEQ ID NO: 1526 - RNA, 20 nt, synthetic construct
  misc_feature 1..20: note = Description of Artificial Sequence: Synthetic oligonucleotide
  source 1..20: mol_type = other RNA
atcaacttcagccatccatt

SEQ ID NO: 1527 - RNA, 20 nt, synthetic construct
  misc_feature 1..20: note = Description of Artificial Sequence: Synthetic oligonucleotide
  source 1..20: mol_type = other RNA
catcaacttcagccatccat

SEQ ID NO: 1528 - RNA, 20 nt, synthetic construct
  misc_feature 1..20: note = Description of Artificial Sequence: Synthetic oligonucleotide
  source 1..20: mol_type = other RNA
acatcaacttcagccatcca

SEQ ID NO: 1529 - RNA, 20 nt, synthetic construct
  misc_feature 1..20: note = Description of Artificial Sequence: Synthetic oligonucleotide
  source 1..20: mol_type = other RNA
aacatcaacttcagccatcc

SEQ ID NO: 1530 - RNA, 20 nt, synthetic construct
  misc_feature 1..20: note = Description of Artificial Sequence: Synthetic oligonucleotide
  source 1..20: mol_type = other RNA
gaaaacatcaacttcagcca

SEQ ID NO: 1531 - RNA, 20 nt, synthetic construct
  misc_feature 1..20: note = Description of Artificial Sequence: Synthetic oligonucleotide
  source 1..20: mol_type = other RNA
caggaaaacatcaacttcag

SEQ ID NO: 1532 - RNA, 20 nt, synthetic construct
  misc_feature 1..20: note = Description of Artificial Sequence: Synthetic oligonucleotide
  source 1..20: mol_type = other RNA
tttcaggaaaacatcaactt

SEQ ID NO: 1533 - RNA, 20 nt, synthetic construct
  misc_feature 1..20: note = Description of Artificial Sequence: Synthetic oligonucleotide
  source 1..20: mol_type = other RNA
ctctttcaggaaaacatcaa

SEQ ID NO: 1534 - RNA, 20 nt, synthetic construct
  misc_feature 1..20: note = Description of Artificial Sequence: Synthetic oligonucleotide
  source 1..20: mol_type = other RNA
ttcctctttcaggaaaacat

SEQ ID NO: 1535 - RNA, 20 nt, synthetic construct
  misc_feature 1..20: note = Description of Artificial Sequence: Synthetic oligonucleotide
  source 1..20: mol_type = other RNA
gccattcctctttcaggaaa

SEQ ID NO: 1536 - RNA, 20 nt, synthetic construct
  misc_feature 1..20: note = Description of Artificial Sequence: Synthetic oligonucleotide
  source 1..20: mol_type = other RNA
ggccattcctctttcaggaa

SEQ ID NO: 1537 - RNA, 20 nt, synthetic construct
  misc_feature 1..20: note = Description of Artificial Sequence: Synthetic oligonucleotide
  source 1..20: mol_type = other RNA
aggccattcctctttcagga

SEQ ID NO: 1538 - RNA, 20 nt, synthetic construct
  misc_feature 1..20: note = Description of Artificial Sequence: Synthetic oligonucleotide
  source 1..20: mol_type = other RNA
caggccattcctctttcagg

SEQ ID NO: 1539 - RNA, 20 nt, synthetic construct
  misc_feature 1..20: note = Description of Artificial Sequence: Synthetic oligonucleotide
  source 1..20: mol_type = other RNA
gcaggccattcctctttcag

SEQ ID NO: 1540 - RNA, 20 nt, synthetic construct
  misc_feature 1..20: note = Description of Artificial Sequence: Synthetic oligonucleotide
  source 1..20: mol_type = other RNA
ggcaggccattcctctttca

SEQ ID NO: 1541 - RNA, 20 nt, synthetic construct
  misc_feature 1..20: note = Description of Artificial Sequence: Synthetic oligonucleotide
  source 1..20: mol_type = other RNA
gggcaggccattcctctttc

SEQ ID NO: 1542 - RNA, 20 nt, synthetic construct
  misc_feature 1..20: note = Description of Artificial Sequence: Synthetic oligonucleotide
  source 1..20: mol_type = other RNA
agggcaggccattcctcttt

SEQ ID NO: 1543 - RNA, 20 nt, synthetic construct
  misc_feature 1..20: note = Description of Artificial Sequence: Synthetic oligonucleotide
  source 1..20: mol_type = other RNA
cagggcaggccattcctctt

SEQ ID NO: 1544 - RNA, 20 nt, synthetic construct
  misc_feature 1..20: note = Description of Artificial Sequence: Synthetic oligonucleotide
  source 1..20: mol_type = other RNA
ccagggcaggccattcctct

SEQ ID NO: 1545 - RNA, 20 nt, synthetic construct
  misc_feature 1..20: note = Description of Artificial Sequence: Synthetic oligonucleotide
  source 1..20: mol_type = other RNA
cccagggcaggccattcctc

SEQ ID NO: 1546 - RNA, 20 nt, synthetic construct
  misc_feature 1..20: note = Description of Artificial Sequence: Synthetic oligonucleotide
  source 1..20: mol_type = other RNA
ccccagggcaggccattcct

SEQ ID NO: 1547 - RNA, 20 nt, synthetic construct
  misc_feature 1..20: note = Description of Artificial Sequence: Synthetic oligonucleotide
  source 1..20: mol_type = other RNA
cccccagggcaggccattcc

SEQ ID NO: 1548 - RNA, 20 nt, synthetic construct
  misc_feature 1..20: note = Description of Artificial Sequence: Synthetic oligonucleotide
  source 1..20: mol_type = other RNA
tcccccagggcaggccattc

SEQ ID NO: 1549 - RNA, 20 nt, synthetic construct
  misc_feature 1..20: note = Description of Artificial Sequence: Synthetic oligonucleotide
  source 1..20: mol_type = other RNA
atcccccagggcaggccatt

SEQ ID NO: 1550 - RNA, 20 nt, synthetic construct
  misc_feature 1..20: note = Description of Artificial Sequence: Synthetic oligonucleotide
  source 1..20: mol_type = other RNA
catcccccagggcaggccat

SEQ ID NO: 1551 - RNA, 20 nt, synthetic construct
  misc_feature 1..20: note = Description of Artificial Sequence: Synthetic oligonucleotide
  source 1..20: mol_type = other RNA
gcatcccccagggcaggcca

SEQ ID NO: 1552 - RNA, 20 nt, synthetic construct
  misc_feature 1..20: note = Description of Artificial Sequence: Synthetic oligonucleotide
  source 1..20: mol_type = other RNA
agcatcccccagggcaggcc

SEQ ID NO: 1553 - RNA, 20 nt, synthetic construct
  misc_feature 1..20: note = Description of Artificial Sequence: Synthetic oligonucleotide
  source 1..20: mol_type = other RNA
cagcatcccccagggcaggc

SEQ ID NO: 1554 - RNA, 20 nt, synthetic construct
  misc_feature 1..20: note = Description of Artificial Sequence: Synthetic oligonucleotide
  source 1..20: mol_type = other RNA
tcagcatcccccagggcagg

SEQ ID NO: 1555 - RNA, 20 nt, synthetic construct
  misc_feature 1..20: note = Description of Artificial Sequence: Synthetic oligonucleotide
  source 1..20: mol_type = other RNA
ttcagcatcccccagggcag

SEQ ID NO: 1556 - RNA, 20 nt, synthetic construct
  misc_feature 1..20: note = Description of Artificial Sequence: Synthetic oligonucleotide
  source 1..20: mol_type = other RNA
tttcagcatcccccagggca

SEQ ID NO: 1557 - RNA, 20 nt, synthetic construct
  misc_feature 1..20: note = Description of Artificial Sequence: Synthetic oligonucleotide
  source 1..20: mol_type = other RNA
atttcagcatcccccagggc

SEQ ID NO: 1558 - RNA, 20 nt, synthetic construct
  misc_feature 1..20: note = Description of Artificial Sequence: Synthetic oligonucleotide
  source 1..20: mol_type = other RNA
gatttcagcatcccccaggg

SEQ ID NO: 1559 - RNA, 20 nt, synthetic construct
  misc_feature 1..20: note = Description of Artificial Sequence: Synthetic oligonucleotide
  source 1..20: mol_type = other RNA
ggatttcagcatcccccagg

SEQ ID NO: 1560 - RNA, 20 nt, synthetic construct
  misc_feature 1..20: note = Description of Artificial Sequence: Synthetic oligonucleotide
  source 1..20: mol_type = other RNA
aggatttcagcatcccccag

SEQ ID NO: 1561 - RNA, 20 nt, synthetic construct
  misc_feature 1..20: note = Description of Artificial Sequence: Synthetic oligonucleotide
  source 1..20: mol_type = other RNA
caggatttcagcatccccca

SEQ ID NO: 1562 - RNA, 20 nt, synthetic construct
  misc_feature 1..20: note = Description of Artificial Sequence: Synthetic oligonucleotide
  source 1..20: mol_type = other RNA
tcaggatttcagcatccccc

SEQ ID NO: 1563 - RNA, 20 nt, synthetic construct
  misc_feature 1..20: note = Description of Artificial Sequence: Synthetic oligonucleotide
  source 1..20: mol_type = other RNA
ttcaggatttcagcatcccc

SEQ ID NO: 1564 - RNA, 20 nt, synthetic construct
  misc_feature 1..20: note = Description of Artificial Sequence: Synthetic oligonucleotide
  source 1..20: mol_type = other RNA
tttcaggatttcagcatccc

SEQ ID NO: 1565 - RNA, 20 nt, synthetic construct
  misc_feature 1..20: note = Description of Artificial Sequence: Synthetic oligonucleotide
  source 1..20: mol_type = other RNA
ttttcaggatttcagcatcc

SEQ ID NO: 1566 - RNA, 20 nt, synthetic construct
  misc_feature 1..20: note = Description of Artificial Sequence: Synthetic oligonucleotide
  source 1..20: mol_type = other RNA
tttttcaggatttcagcatc

SEQ ID NO: 1567 - RNA, 20 nt, synthetic construct
  misc_feature 1..20: note = Description of Artificial Sequence: Synthetic oligonucleotide
  source 1..20: mol_type = other RNA
ttttttcaggatttcagcat

SEQ ID NO: 1568 - RNA, 20 nt, synthetic construct
  misc_feature 1..20: note = Description of Artificial Sequence: Synthetic oligonucleotide
  source 1..20: mol_type = other RNA
gttttttcaggatttcagca

SEQ ID NO: 1569 - RNA, 20 nt, synthetic construct
  misc_feature 1..20: note = Description of Artificial Sequence: Synthetic oligonucleotide
  source 1..20: mol_type = other RNA
tgttttttcaggatttcagc

SEQ ID NO: 1570 - RNA, 20 nt, synthetic construct
  misc_feature 1..20: note = Description of Artificial Sequence: Synthetic oligonucleotide
  source 1..20: mol_type = other RNA
ctgttttttcaggatttcag

SEQ ID NO: 1571 - RNA, 20 nt, synthetic construct
  misc_feature 1..20: note = Description of Artificial Sequence: Synthetic oligonucleotide
  source 1..20: mol_type = other RNA
gctgttttttcaggatttca

SEQ ID NO: 1572 - RNA, 20 nt, synthetic construct
  misc_feature 1..20: note = Description of Artificial Sequence: Synthetic oligonucleotide
  source 1..20: mol_type = other RNA
agctgttttttcaggatttc

SEQ ID NO: 1573 - RNA, 20 nt, synthetic construct
  misc_feature 1..20: note = Description of Artificial Sequence: Synthetic oligonucleotide
  source 1..20: mol_type = other RNA
gagctgttttttcaggattt

SEQ ID NO: 1574 - RNA, 20 nt, synthetic construct
  misc_feature 1..20: note = Description of Artificial Sequence: Synthetic oligonucleotide
  source 1..20: mol_type = other RNA
tgagctgttttttcaggatt

SEQ ID NO: 1575 - RNA, 20 nt, synthetic construct
  misc_feature 1..20: note = Description of Artificial Sequence: Synthetic oligonucleotide
  source 1..20: mol_type = other RNA
ttgagctgttttttcaggat

SEQ ID NO: 1576 - RNA, 20 nt, synthetic construct
  misc_feature 1..20: note = Description of Artificial Sequence: Synthetic oligonucleotide
  source 1..20: mol_type = other RNA
tttgagctgttttttcagga

SEQ ID NO: 1577 - RNA, 20 nt, synthetic construct
  misc_feature 1..20: note = Description of Artificial Sequence: Synthetic oligonucleotide
  source 1..20: mol_type = other RNA
gtttgagctgttttttcagg

SEQ ID NO: 1578 - RNA, 20 nt, synthetic construct
  misc_feature 1..20: note = Description of Artificial Sequence: Synthetic oligonucleotide
  source 1..20: mol_type = other RNA
ttgtttgagctgttttttca

SEQ ID NO: 1579 - RNA, 20 nt, synthetic construct
  misc_feature 1..20: note = Description of Artificial Sequence: Synthetic oligonucleotide
  source 1..20: mol_type = other RNA
cattgtttgagctgtttttt

SEQ ID NO: 1580 - RNA, 20 nt, synthetic construct
  misc_feature 1..20: note = Description of Artificial Sequence: Synthetic oligonucleotide
  source 1..20: mol_type = other RNA
gcattgtttgagctgttttt

SEQ ID NO: 1581 - RNA, 20 nt, synthetic construct
  misc_feature 1..20: note = Description of Artificial Sequence: Synthetic oligonucleotide
  source 1..20: mol_type = other RNA
tgcattgtttgagctgtttt

SEQ ID NO: 1582 - RNA, 20 nt, synthetic construct
  misc_feature 1..20: note = Description of Artificial Sequence: Synthetic oligonucleotide
  source 1..20: mol_type = other RNA
ctgcattgtttgagctgttt

SEQ ID NO: 1583 - RNA, 20 nt, synthetic construct
  misc_feature 1..20: note = Description of Artificial Sequence: Synthetic oligonucleotide
  source 1..20: mol_type = other RNA
tctgcattgtttgagctgtt

SEQ ID NO: 1584 - RNA, 20 nt, synthetic construct
  misc_feature 1..20: note = Description of Artificial Sequence: Synthetic oligonucleotide
  source 1..20: mol_type = other RNA
ctctgcattgtttgagctgt

SEQ ID NO: 1585 - RNA, 20 nt, synthetic construct
  misc_feature 1..20: note = Description of Artificial Sequence: Synthetic oligonucleotide
  source 1..20: mol_type = other RNA
actctgcattgtttgagctg

SEQ ID NO: 1586 - RNA, 20 nt, synthetic construct
  misc_feature 1..20: note = Description of Artificial Sequence: Synthetic oligonucleotide
  source 1..20: mol_type = other RNA
tactctgcattgtttgagct

SEQ ID NO: 1587 - RNA, 20 nt, synthetic construct
  misc_feature 1..20: note = Description of Artificial Sequence: Synthetic oligonucleotide
  source 1..20: mol_type = other RNA
ttactctgcattgtttgagc

SEQ ID NO: 1588 - RNA, 20 nt, synthetic construct
  misc_feature 1..20: note = Description of Artificial Sequence: Synthetic oligonucleotide
  source 1..20: mol_type = other RNA
cttactctgcattgtttgag

SEQ ID NO: 1589 - RNA, 20 nt, synthetic construct
  misc_feature 1..20: note = Description of Artificial Sequence: Synthetic oligonucleotide
  source 1..20: mol_type = other RNA
tcttactctgcattgtttga

SEQ ID NO: 1590 - RNA, 20 nt, synthetic construct
  misc_feature 1..20: note = Description of Artificial Sequence: Synthetic oligonucleotide
  source 1..20: mol_type = other RNA
atcttactctgcattgtttg

SEQ ID NO: 1591 - RNA, 20 nt, synthetic construct
  misc_feature 1..20: note = Description of Artificial Sequence: Synthetic oligonucleotide
  source 1..20: mol_type = other RNA
aatcttactctgcattgttt

SEQ ID NO: 1592 - RNA, 20 nt, synthetic construct
  misc_feature 1..20: note = Description of Artificial Sequence: Synthetic oligonucleotide
  source 1..20: mol_type = other RNA
caaatcttactctgcattgt

SEQ ID NO: 1593 - RNA, 20 nt, synthetic construct
  misc_feature 1..20: note = Description of Artificial Sequence: Synthetic oligonucleotide
  source 1..20: mol_type = other RNA
gatacaaatcttactctgca

SEQ ID NO: 1594 - RNA, 20 nt, synthetic construct
  modified_base 9: mod_base = OTHER; note = thymine
  modified_base 15: mod_base = OTHER; note = thymine
  misc_feature 1..20: note = Description of Combined DNA/RNA Molecule: Synthetic oligonucleotide
  source 1..20: mol_type = other RNA
gggtcagctgccaatgctag

SEQ ID NO: 1595 - RNA, 20 nt, synthetic construct
  modified_base 9: mod_base = OTHER; note = thymine
  modified_base 15: mod_base = OTHER; note = thymine
  misc_feature 1..20: note = Description of Combined DNA/RNA Molecule: Synthetic oligonucleotide
  source 1..20: mol_type = other RNA
gggtcagctgccaatgctag

SEQ ID NO: 1596 - RNA, 20 nt, synthetic construct
  modified_base 9: mod_base = OTHER; note = thymine
  modified_base 15: mod_base = OTHER; note = thymine
  misc_feature 1..20: note = Description of Combined DNA/RNA Molecule: Synthetic oligonucleotide
  source 1..20: mol_type = other RNA
gggtcagctgccaatgctag

SEQ ID NO: 1597 - RNA, 20 nt, synthetic construct
  modified_base 9: mod_base = OTHER; note = thymine
  modified_base 15: mod_base = OTHER; note = thymine
  misc_feature 1..20: note = Description of Combined DNA/RNA Molecule: Synthetic oligonucleotide
  source 1..20: mol_type = other RNA
gggtcagctgccaatgctag

SEQ ID NO: 1598 - RNA, 20 nt, synthetic construct
  modified_base 9: mod_base = OTHER; note = thymine
  modified_base 15: mod_base = OTHER; note = thymine
  modified_base 18: mod_base = OTHER; note = thymine
  misc_feature 1..20: note = Description of Combined DNA/RNA Molecule: Synthetic oligonucleotide
  source 1..20: mol_type = other RNA
gggtcagctgccaatgctag

SEQ ID NO: 1599 - RNA, 20 nt, synthetic construct
  modified_base 9: mod_base = OTHER; note = thymine
  modified_base 15: mod_base = OTHER; note = thymine
  modified_base 18: mod_base = OTHER; note = thymine
  misc_feature 1..20: note = Description of Combined DNA/RNA Molecule: Synthetic oligonucleotide
  source 1..20: mol_type = other RNA
gggtcagctgccaatgctag

SEQ ID NO: 1600 - RNA, 20 nt, synthetic construct
  modified_base 4: mod_base = OTHER; note = thymine
  modified_base 9: mod_base = OTHER; note = thymine
  modified_base 15: mod_base = OTHER; note = thymine
  misc_feature 1..20: note = Description of Combined DNA/RNA Molecule: Synthetic oligonucleotide
  source 1..20: mol_type = other RNA
gggtcagctgccaatgctag

SEQ ID NO: 1601 - RNA, 20 nt, synthetic construct
  modified_base 4: mod_base = OTHER; note = thymine
  modified_base 9: mod_base = OTHER; note = thymine
  modified_base 15: mod_base = OTHER; note = thymine
  misc_feature 1..20: note = Description of Combined DNA/RNA Molecule: Synthetic oligonucleotide
  source 1..20: mol_type = other RNA
gggtcagctgccaatgctag

SEQ ID NO: 1602 - RNA, 20 nt, synthetic construct
  modified_base 9: mod_base = OTHER; note = thymine
  modified_base 15: mod_base = OTHER; note = thymine
  misc_feature 1..20: note = Description of Combined DNA/RNA Molecule: Synthetic oligonucleotide
  source 1..20: mol_type = other RNA
gggtcagctgccaatgctag

SEQ ID NO: 1603 - RNA, 20 nt, synthetic construct
  modified_base 9: mod_base = OTHER; note = thymine
  modified_base 15: mod_base = OTHER; note = thymine
  misc_feature 1..20: note = Description of Combined DNA/RNA Molecule: Synthetic oligonucleotide
  source 1..20: mol_type = other RNA
gggtcagctgccaatgctag

SEQ ID NO: 1604 - DNA, 20 bp, synthetic construct
  misc_feature 1..20: note = Description of Artificial Sequence: Synthetic oligonucleotide
  source 1..20: mol_type = other DNA
gggtcagctgccaatgctag

SEQ ID NO: 1605 - DNA, 20 bp, synthetic construct
  misc_feature 1..20: note = Description of Artificial Sequence: Synthetic oligonucleotide
  source 1..20: mol_type = other DNA
gggtcagctgccaatgctag

SEQ ID NO: 1606 - RNA, 20 nt, synthetic construct
  modified_base 9: mod_base = OTHER; note = thymine
  modified_base 15: mod_base = OTHER; note = thymine
  misc_feature 1..20: note = Description of Combined DNA/RNA Molecule: Synthetic oligonucleotide
  source 1..20: mol_type = other RNA
gggtcagctgccaatgctag

SEQ ID NO: 1607 - RNA, 20 nt, synthetic construct
  modified_base 9: mod_base = OTHER; note = thymine
  modified_base 15: mod_base = OTHER; note = thymine
  misc_feature 1..20: note = Description of Combined DNA/RNA Molecule: Synthetic oligonucleotide
  source 1..20: mol_type = other RNA
gggtcagctgccaatgctag

SEQ ID NO: 1608 - RNA, 20 nt, synthetic construct
  modified_base 9: mod_base = OTHER; note = thymine
  modified_base 15: mod_base = OTHER; note = thymine
  misc_feature 1..20: note = Description of Combined DNA/RNA Molecule: Synthetic oligonucleotide
  source 1..20: mol_type = other RNA
gggtcagctgccaatgctag

SEQ ID NO: 1609 - RNA, 20 nt, synthetic construct
  modified_base 9: mod_base = OTHER; note = thymine
  modified_base 15: mod_base = OTHER; note = thymine
  misc_feature 1..20: note = Description of Combined DNA/RNA Molecule: Synthetic oligonucleotide
  source 1..20: mol_type = other RNA
gggtcagctgccaatgctag

SEQ ID NO: 1610 - RNA, 20 nt, synthetic construct
  modified_base 9: mod_base = OTHER; note = thymine
  modified_base 15: mod_base = OTHER; note = thymine
  misc_feature 1..20: note = Description of Combined DNA/RNA Molecule: Synthetic oligonucleotide
  source 1..20: mol_type = other RNA
gggtcagctgccaatgctag

SEQ ID NO: 1611 - RNA, 20 nt, synthetic construct
  modified_base 9: mod_base = OTHER; note = thymine
  modified_base 15: mod_base = OTHER; note = thymine
  misc_feature 1..20: note = Description of Combined DNA/RNA Molecule: Synthetic oligonucleotide
  source 1..20: mol_type = other RNA
gggtcagctgccaatgctag

SEQ ID NO: 1612 - RNA, 20 nt, synthetic construct
  modified_base 9: mod_base = OTHER; note = thymine
  modified_base 15: mod_base = OTHER; note = thymine
  misc_feature 1..20: note = Description of Combined DNA/RNA Molecule: Synthetic oligonucleotide
  source 1..20: mol_type = other RNA
gggtcagctgccaatgctag

SEQ ID NO: 1613 - RNA, 20 nt, synthetic construct
  modified_base 9: mod_base = OTHER; note = thymine
  modified_base 15: mod_base = OTHER; note = thymine
  misc_feature 1..20: note = Description of Combined DNA/RNA Molecule: Synthetic oligonucleotide
  source 1..20: mol_type = other RNA
gggtcagctgccaatgctag

SEQ ID NO: 1614 - RNA, 20 nt, synthetic construct
  modified_base 9: mod_base = OTHER; note = thymine
  modified_base 15: mod_base = OTHER; note = thymine
  misc_feature 1..20: note = Description of Combined DNA/RNA Molecule: Synthetic oligonucleotide
  source 1..20: mol_type = other RNA
gggtcagctgccaatgctag

SEQ ID NO: 1615 - RNA, 20 nt, synthetic construct
  modified_base 9: mod_base = OTHER; note = thymine
  modified_base 15: mod_base = OTHER; note = thymine
  misc_feature 1..20: note = Description of Combined DNA/RNA Molecule: Synthetic oligonucleotide
  source 1..20: mol_type = other RNA
gggtcagctgccaatgctag

SEQ ID NO: 1616 - RNA, 20 nt, synthetic construct
  modified_base 9: mod_base = OTHER; note = thymine
  modified_base 15: mod_base = OTHER; note = thymine
  misc_feature 1..20: note = Description of Combined DNA/RNA Molecule: Synthetic oligonucleotide
  source 1..20: mol_type = other RNA
gggtcagctgccaatgctag

SEQ ID NO: 1617 - RNA, 20 nt, synthetic construct
  modified_base 9: mod_base = OTHER; note = thymine
  modified_base 15: mod_base = OTHER; note = thymine
  misc_feature 1..20: note = Description of Combined DNA/RNA Molecule: Synthetic oligonucleotide
  source 1..20: mol_type = other RNA
gggtcagctgccaatgctag

SEQ ID NO: 1618 - RNA, 20 nt, synthetic construct
  modified_base 9: mod_base = OTHER; note = thymine
  modified_base 15: mod_base = OTHER; note = thymine
  misc_feature 1..20: note = Description of Combined DNA/RNA Molecule: Synthetic oligonucleotide
  source 1..20: mol_type = other RNA
gggtcagctgccaatgctag

SEQ ID NO: 1619 - RNA, 20 nt, synthetic construct
  modified_base 9: mod_base = OTHER; note = thymine
  modified_base 15: mod_base = OTHER; note = thymine
  misc_feature 1..20: note = Description of Combined DNA/RNA Molecule: Synthetic oligonucleotide
  source 1..20: mol_type = other RNA
gggtcagctgccaatgctag

SEQ ID NO: 1620 - RNA, 20 nt, synthetic construct
  modified_base 9: mod_base = OTHER; note = thymine
  modified_base 15: mod_base = OTHER; note = thymine
  misc_feature 1..20: note = Description of Combined DNA/RNA Molecule: Synthetic oligonucleotide
  source 1..20: mol_type = other RNA
gggtcagctgccaatgctag

SEQ ID NO: 1621 - RNA, 20 nt, synthetic construct
  modified_base 9: mod_base = OTHER; note = thymine
  modified_base 15: mod_base = OTHER; note = thymine
  misc_feature 1..20: note = Description of Combined DNA/RNA Molecule: Synthetic oligonucleotide
  source 1..20: mol_type = other RNA
gggtcagctgccaatgctag

SEQ ID NO: 1622 - RNA, 20 nt, synthetic construct
  modified_base 9: mod_base = OTHER; note = thymine
  modified_base 15: mod_base = OTHER; note = thymine
  misc_feature 1..20: note = Description of Combined DNA/RNA Molecule: Synthetic oligonucleotide
  source 1..20: mol_type = other RNA
gggtcagctgccaatgctag

SEQ ID NO: 1623 - RNA, 20 nt, synthetic construct
  modified_base 9: mod_base = OTHER; note = thymine
  modified_base 15: mod_base = OTHER; note = thymine
  misc_feature 1..20: note = Description of Combined DNA/RNA Molecule: Synthetic oligonucleotide
  source 1..20: mol_type = other RNA
gggtcagctgccaatgctag

SEQ ID NO: 1624 - RNA, 20 nt, synthetic construct
  modified_base 9: mod_base = OTHER; note = thymine
  modified_base 15: mod_base = OTHER; note = thymine
  misc_feature 1..20: note = Description of Combined DNA/RNA Molecule: Synthetic oligonucleotide
  source 1..20: mol_type = other RNA
gggtcagctgccaatgctag

SEQ ID NO: 1625 - RNA, 20 nt, synthetic construct
  modified_base 9: mod_base = OTHER; note = thymine
  modified_base 15: mod_base = OTHER; note = thymine
  misc_feature 1..20: note = Description of Combined DNA/RNA Molecule: Synthetic oligonucleotide
  source 1..20: mol_type = other RNA
gggtcagctgccaatgctag

SEQ ID NO: 1626 - RNA, 20 nt, synthetic construct
  modified_base 9: mod_base = OTHER; note = thymine
  modified_base 15: mod_base = OTHER; note = thymine
  misc_feature 1..20: note = Description of Combined DNA/RNA Molecule: Synthetic oligonucleotide
  source 1..20: mol_type = other RNA
gggtcagctgccaatgctag

SEQ ID NO: 1627 - RNA, 20 nt, synthetic construct
  modified_base 9: mod_base = OTHER; note = thymine
  modified_base 15: mod_base = OTHER; note = thymine
  misc_feature 1..20: note = Description of Combined DNA/RNA Molecule: Synthetic oligonucleotide
  source 1..20: mol_type = other RNA
gggtcagctgccaatgctag

SEQ ID NO: 1628 - RNA, 20 nt, synthetic construct
  modified_base 9: mod_base = OTHER; note = thymine
  modified_base 15: mod_base = OTHER; note = thymine
  misc_feature 1..20: note = Description of Combined DNA/RNA Molecule: Synthetic oligonucleotide
  source 1..20: mol_type = other RNA
gggtcagctgccaatgctag

SEQ ID NO: 1629 - RNA, 20 nt, synthetic construct
  modified_base 9: mod_base = OTHER; note = thymine
  modified_base 15: mod_base = OTHER; note = thymine
  misc_feature 1..20: note = Description of Combined DNA/RNA Molecule: Synthetic oligonucleotide
  source 1..20: mol_type = other RNA
gggtcagctgccaatgctag

SEQ ID NO: 1630 - RNA, 20 nt, synthetic construct
  modified_base 9: mod_base = OTHER; note = thymine
  modified_base 15: mod_base = OTHER; note = thymine
  misc_feature 1..20: note = Description of Combined DNA/RNA Molecule: Synthetic oligonucleotide
  source 1..20: mol_type = other RNA
gggtcagctgccaatgctag

SEQ ID NO: 1631 - RNA, 20 nt, synthetic construct
  modified_base 9: mod_base = OTHER; note = thymine
  modified_base 15: mod_base = OTHER; note = thymine
  misc_feature 1..20: note = Description of Combined DNA/RNA Molecule: Synthetic oligonucleotide
  source 1..20: mol_type = other RNA
gggtcagctgccaatgctag

SEQ ID NO: 1632 - RNA, 20 nt, synthetic construct
  modified_base 9: mod_base = OTHER; note = thymine
  modified_base 15: mod_base = OTHER; note = thymine
  misc_feature 1..20: note = Description of Combined DNA/RNA Molecule: Synthetic oligonucleotide
  source 1..20: mol_type = other RNA
gggtcagctgccaatgctag

SEQ ID NO: 1633 - RNA, 20 nt, synthetic construct
  modified_base 9: mod_base = OTHER; note = thymine
  modified_base 15: mod_base = OTHER; note = thymine
  misc_feature 1..20: note = Description of Combined DNA/RNA Molecule: Synthetic oligonucleotide
  source 1..20: mol_type = other RNA
gggtcagctgccaatgctag

SEQ ID NO: 1634 - RNA, 20 nt, synthetic construct
  misc_feature 1..20: note = Description of Artificial Sequence: Synthetic oligonucleotide
  source 1..20: mol_type = other RNA
ctagcattggcagctgaccc

SEQ ID NO: 1635 - DNA, 20 bp, synthetic construct
  misc_feature 1..20: note = Description of Artificial Sequence: Synthetic oligonucleotide
  source 1..20: mol_type = other DNA
gggtcagctgccaatgctag

SEQ ID NO: 1636 - RNA, 20 nt, synthetic construct
  modified_base 9: mod_base = OTHER; note = thymine
  modified_base 15: mod_base = OTHER; note = thymine
  misc_feature 1..20: note = Description of Combined DNA/RNA Molecule: Synthetic oligonucleotide
  source 1..20: mol_type = other RNA
gggtcagctgccaatgctag

SEQ ID NO: 1637 - RNA, 20 nt, synthetic construct
  modified_base 9: mod_base = OTHER; note = thymine
  modified_base 15: mod_base = OTHER; note = thymine
  misc_feature 1..20: note = Description of Combined DNA/RNA Molecule: Synthetic oligonucleotide
  source 1..20: mol_type = other RNA
gggtcagctgccaatgctag

SEQ ID NO: 1638 - DNA, 20 bp, synthetic construct
  misc_feature 1..20: note = Description of Artificial Sequence: Synthetic oligonucleotide
  source 1..20: mol_type = other DNA
gggtcagctgccaatgctag

SEQ ID NO: 1639 - DNA, 20 bp, synthetic construct
  misc_feature 1..20: note = Description of Artificial Sequence: Synthetic oligonucleotide
  source 1..20: mol_type = other DNA
gggtcagctgccaatgctag

SEQ ID NO: 1640 - DNA, 20 bp, synthetic construct
  misc_feature 1..20: note = Description of Artificial Sequence: Synthetic oligonucleotide
  source 1..20: mol_type = other DNA
gggtcagctgccaatgctag

SEQ ID NO: 1641 - DNA, 20 bp, synthetic construct
  misc_feature 1..20: note = Description of Artificial Sequence: Synthetic oligonucleotide
  source 1..20: mol_type = other DNA
gggtcagctgccaatgctag

SEQ ID NO: 1642 - DNA, 20 bp, synthetic construct
  misc_feature 1..20: note = Description of Artificial Sequence: Synthetic oligonucleotide
  source 1..20: mol_type = other DNA
gggtcagctgccaatgctag

SEQ ID NO: 1643 - DNA, 20 bp, synthetic construct
  misc_feature 1..20: note = Description of Artificial Sequence: Synthetic oligonucleotide
  source 1..20: mol_type = other DNA
gggtcagctgccaatgctag

SEQ ID NO: 1644 - DNA, 20 bp, synthetic construct
  misc_feature 1..20: note = Description of Artificial Sequence: Synthetic oligonucleotide
  source 1..20: mol_type = other DNA
gggtcagctgccaatgctag

SEQ ID NO: 1645 - DNA, 20 bp, synthetic construct
  misc_feature 1..20: note = Description of Artificial Sequence: Synthetic oligonucleotide
  source 1..20: mol_type = other DNA
gggtcagctgccaatgctag

SEQ ID NO: 1646 - DNA, 20 bp, synthetic construct
  misc_feature 1..20: note = Description of Artificial Sequence: Synthetic oligonucleotide
  source 1..20: mol_type = other DNA
gggtcagctgccaatgctag

SEQ ID NO: 1647 - DNA, 20 bp, synthetic construct
  misc_feature 1..20: note = Description of Artificial Sequence: Synthetic oligonucleotide
  source 1..20: mol_type = other DNA
gggtcagctgccaatgctag

SEQ ID NO: 1648 - DNA, 20 bp, synthetic construct
  misc_feature 1..20: note = Description of Artificial Sequence: Synthetic oligonucleotide
  source 1..20: mol_type = other DNA
gggtcagctgccaatgctag

SEQ ID NO: 1649 - DNA, 20 bp, synthetic construct
  misc_feature 1..20: note = Description of Artificial Sequence: Synthetic oligonucleotide
  source 1..20: mol_type = other DNA
gggtcagctgccaatgctag

SEQ ID NO: 1650 - DNA, 20 bp, synthetic construct
  misc_feature 1..20: note = Description of Artificial Sequence: Synthetic oligonucleotide
  source 1..20: mol_type = other DNA
gggtcagctgccaatgctag

SEQ ID NO: 1651 - DNA, 20 bp, synthetic construct
  misc_feature 1..20: note = Description of Artificial Sequence: Synthetic oligonucleotide
  source 1..20: mol_type = other DNA
gggtcagctgccaatgctag

SEQ ID NO: 1652 - DNA, 20 bp, synthetic construct
  misc_feature 1..20: note = Description of Artificial Sequence: Synthetic oligonucleotide
  source 1..20: mol_type = other DNA
gggtcagctgccaatgctag

SEQ ID NO: 1653 - DNA, 20 bp, synthetic construct
  misc_feature 1..20: note = Description of Artificial Sequence: Synthetic oligonucleotide
  source 1..20: mol_type = other DNA
gggtcagctgccaatgctag

SEQ ID NO: 1654 - DNA, 20 bp, synthetic construct
  misc_feature 1..20: note = Description of Artificial Sequence: Synthetic oligonucleotide
  source 1..20: mol_type = other DNA
gggtcagctgccaatgctag

SEQ ID NO: 1655 - DNA, 20 bp, synthetic construct
  misc_feature 1..20: note = Description of Artificial Sequence: Synthetic oligonucleotide
  source 1..20: mol_type = other DNA
gggtcagctgccaatgctag

SEQ ID NO: 1656 - DNA, 20 bp, synthetic construct
  misc_feature 1..20: note = Description of Artificial Sequence: Synthetic oligonucleotide
  source 1..20: mol_type = other DNA
gggtcagctgccaatgctag

SEQ ID NO: 1657 - DNA, 20 bp, synthetic construct
  misc_feature 1..20: note = Description of Artificial Sequence: Synthetic oligonucleotide
  source 1..20: mol_type = other DNA
gggtcagctgccaatgctag

SEQ ID NO: 1658 - DNA, 20 bp, synthetic construct
  misc_feature 1..20: note = Description of Artificial Sequence: Synthetic oligonucleotide
  source 1..20: mol_type = other DNA
gggtcagctgccaatgctag

SEQ ID NO: 1659 - DNA, 20 bp, synthetic construct
  misc_feature 1..20: note = Description of Artificial Sequence: Synthetic oligonucleotide
  source 1..20: mol_type = other DNA
gggtcagctgccaatgctag

SEQ ID NO: 1660 - RNA, 20 nt, synthetic construct
  modified_base 12: mod_base = OTHER; note = thymine
  misc_feature 1..20: note = Description of Combined DNA/RNA Molecule: Synthetic oligonucleotide
  source 1..20: mol_type = other RNA
tagcgcccacctcacccctc

SEQ ID NO: 1661 - RNA, 20 nt, synthetic construct
  modified_base 13: mod_base = OTHER; note = thymine
  misc_feature 1..20: note = Description of Combined DNA/RNA Molecule: Synthetic oligonucleotide
  source 1..20: mol_type = other RNA
ttagcgcccacctcacccct

SEQ ID NO: 1662 - RNA, 20 nt, synthetic construct
  modified_base 14: mod_base = OTHER; note = thymine
  misc_feature 1..20: note = Description of Combined DNA/RNA Molecule: Synthetic oligonucleotide
  source 1..20: mol_type = other RNA
cttagcgcccacctcacccc

SEQ ID NO: 1663 - DNA, 20 bp, synthetic construct
  misc_feature 1..20: note = Description of Artificial Sequence: Synthetic oligonucleotide
  source 1..20: mol_type = other DNA
accccgtcctggaaaccagg

SEQ ID NO: 1664 - DNA, 20 bp, synthetic construct
  misc_feature 1..20: note = Description of Artificial Sequence: Synthetic oligonucleotide
  source 1..20: mol_type = other DNA
ccccgtcctggaaaccagga

SEQ ID NO: 1665 - RNA, 20 nt, synthetic construct
  modified_base 15: mod_base = OTHER; note = thymine
  misc_feature 1..20: note = Description of Combined DNA/RNA Molecule: Synthetic oligonucleotide
  source 1..20: mol_type = other RNA
gcttagcgcccacctcaccc

SEQ ID NO: 1666 - RNA, 20 nt, synthetic construct
  misc_feature 1..20: note = Description of Artificial Sequence: Synthetic oligonucleotide
  source 1..20: mol_type = other RNA
ggcttagcgcccacctcacc

SEQ ID NO: 1667 - RNA, 20 nt, synthetic construct
  modified_base 8: mod_base = OTHER; note = thymine
  misc_feature 1..20: note = Description of Combined DNA/RNA Molecule: Synthetic oligonucleotide
  source 1..20: mol_type = other RNA
cccgtcctggaaaccaggag

SEQ ID NO: 1668 - RNA, 20 nt, synthetic construct
  modified_base 10: mod_base = OTHER; note = thymine
  modified_base 13: mod_base = OTHER; note = thymine
  misc_feature 1..20: note = Description of Combined DNA/RNA Molecule: Synthetic oligonucleotide
  source 1..20: mol_type = other RNA
tgaaccccgtcctggaaacc

SEQ ID NO: 1669 - RNA, 20 nt, synthetic construct
  modified_base 8: mod_base = OTHER; note = thymine
  modified_base 12: mod_base = OTHER; note = thymine
  modified_base 15: mod_base = OTHER; note = thymine
  misc_feature 1..20: note = Description of Combined DNA/RNA Molecule: Synthetic oligonucleotide
  source 1..20: mol_type = other RNA
tttcccctccctcatcaaca

SEQ ID NO: 1670 - RNA, 20 nt, synthetic construct
  modified_base 9: mod_base = OTHER; note = thymine
  modified_base 13: mod_base = OTHER; note = thymine
  misc_feature 1..20: note = Description of Combined DNA/RNA Molecule: Synthetic oligonucleotide
  source 1..20: mol_type = other RNA
agctccagtccctgaaggtg

SEQ ID NO: 1671 - RNA, 20 nt, synthetic construct
  modified_base 6: mod_base = OTHER; note = thymine
  misc_feature 1..20: note = Description of Combined DNA/RNA Molecule: Synthetic oligonucleotide
  source 1..20: mol_type = other RNA
aggcttagcgcccacctcac

SEQ ID NO: 1672 - RNA, 20 nt, synthetic construct
  modified_base 9: mod_base = OTHER; note = thymine
  modified_base 13: mod_base = OTHER; note = thymine
  misc_feature 1..20: note = Description of Combined DNA/RNA Molecule: Synthetic oligonucleotide
  source 1..20: mol_type = other RNA
gtttcccctccctcatcaac

SEQ ID NO: 1673 - DNA, 20 bp, synthetic construct
  misc_feature 1..20: note = Description of Artificial Sequence: Synthetic oligonucleotide
  source 1..20: mol_type = other DNA
aaccccgtcctggaaaccag

SEQ ID NO: 1674 - DNA, 20 bp, synthetic construct
  misc_feature 1..20: note = Description of Artificial Sequence: Synthetic oligonucleotide
  source 1..20: mol_type = other DNA
gaaccccgtcctggaaacca

SEQ ID NO: 1675 - RNA, 20 nt, synthetic construct
  modified_base 8: mod_base = OTHER; note = thymine
  modified_base 12: mod_base = OTHER; note = thymine
  misc_feature 1..20: note = Description of Combined DNA/RNA Molecule: Synthetic oligonucleotide
  source 1..20: mol_type = other RNA
gctccagtccctgaaggtgt

SEQ ID NO: 1676 - RNA, 20 nt, synthetic construct
  modified_base 11: mod_base = OTHER; note = thymine
  modified_base 14: mod_base = OTHER; note = thymine
  misc_feature 1..20: note = Description of Combined DNA/RNA Molecule: Synthetic oligonucleotide
  source 1..20: mol_type = other RNA
ttgaaccccgtcctggaaac

SEQ ID NO: 1677 - RNA, 20 nt, synthetic construct
  modified_base 7: mod_base = OTHER; note = thymine
  modified_base 11: mod_base = OTHER; note = thymine
  modified_base 14: mod_base = OTHER; note = thymine
  misc_feature 1..20: note = Description of Combined DNA/RNA Molecule: Synthetic oligonucleotide
  source 1..20: mol_type = other RNA
ttcccctccctcatcaacaa

SEQ ID NO: 1678 - RNA, 20 nt, synthetic construct
  modified_base 7: mod_base = OTHER; note = thymine
  misc_feature 1..20: note = Description of Combined DNA/RNA Molecule: Synthetic oligonucleotide
  source 1..20: mol_type = other RNA
ccgtcctggaaaccaggagt

SEQ ID NO: 1679 - DNA, 20 bp, synthetic construct
  misc_feature 1..20: note = Description of Artificial Sequence: Synthetic oligonucleotide
  source 1..20: mol_type = other DNA
gcagctccagtccctgaagg

SEQ ID NO: 1680 - RNA, 20 nt, synthetic construct
  modified_base 9: mod_base = OTHER; note = thymine
  modified_base 12..13: mod_base = OTHER; note = thymine
  modified_base 15: mod_base = OTHER; note = thymine
  misc_feature 1..20: note = Description of Combined DNA/RNA Molecule: Synthetic oligonucleotide
  source 1..20: mol_type = other RNA
tgccaggctggttatgactc

SEQ ID NO: 1681 - RNA, 20 nt, synthetic construct
  modified_base 6: mod_base = OTHER; note = thymine
  misc_feature 1..20: note = Description of Combined DNA/RNA Molecule: Synthetic oligonucleotide
  source 1..20: mol_type = other RNA
cgtcctggaaaccaggagtg

SEQ ID NO: 1682 - RNA, 20 nt, synthetic construct
  modified_base 10: mod_base = OTHER; note = thymine
  modified_base 14: mod_base = OTHER; note = thymine
  misc_feature 1..20: note = Description of Combined DNA/RNA Molecule: Synthetic oligonucleotide
  source 1..20: mol_type = other RNA
cagctccagtccctgaaggt

SEQ ID NO: 1683 - RNA, 20 nt, synthetic construct
  modified_base 10: mod_base = OTHER; note = thymine
  modified_base 13..14: mod_base = OTHER; note = thymine
  misc_feature 1..20: note = Description of Combined DNA/RNA Molecule: Synthetic oligonucleotide
  source 1..20: mol_type = other RNA
ctgccaggctggttatgact

SEQ ID NO: 1684 - RNA, 20 nt, synthetic construct
  misc_feature 1..20: note = Description of Artificial Sequence: Synthetic oligonucleotide
  source 1..20: mol_type = other RNA
tcctggaaaccaggagtgcc

SEQ ID NO: 1685 - RNA, 20 nt, synthetic construct
  modified_base 6..7: mod_base = OTHER; note = thymine
  misc_feature 1..20: note = Description of Combined DNA/RNA Molecule: Synthetic oligonucleotide
  source 1..20: mol_type = other RNA
aaggcttagcgcccacctca

SEQ ID NO: 1686 - RNA, 20 nt, synthetic construct
  modified_base 7: mod_base = OTHER; note = thymine
  modified_base 10..11: mod_base = OTHER; note = thymine
  modified_base 13: mod_base = OTHER; note = thymine
  misc_feature 1..20: note = Description of Combined DNA/RNA Molecule: Synthetic oligonucleotide
  source 1..20: mol_type = other RNA
ccaggctggttatgactcag

SEQ ID NO: 1687 - RNA, 20 nt, synthetic construct
  misc_feature 1..20: note = Description of Artificial Sequence: Synthetic oligonucleotide
  source 1..20: mol_type = other RNA
cctggaaaccaggagtgcca

SEQ ID NO: 1688 - RNA, 20 nt, synthetic construct
  modified_base 8: mod_base = OTHER; note = thymine
  modified_base 11..12: mod_base = OTHER; note = thymine
  modified_base 14: mod_base = OTHER; note = thymine
  misc_feature 1..20: note = Description of Combined DNA/RNA Molecule: Synthetic oligonucleotide
  source 1..20: mol_type = other RNA
gccaggctggttatgactca

SEQ ID NO: 1689 - RNA, 20 nt, synthetic construct
  modified_base 7..8: mod_base = OTHER; note = thymine
  misc_feature 1..20: note = Description of Combined DNA/RNA Molecule: Synthetic oligonucleotide
  source 1..20: mol_type = other RNA
aaaggcttagcgcccacctc

SEQ ID NO: 1690 - RNA, 20 nt, synthetic construct
  modified_base 11..12: mod_base = OTHER; note = thymine
  modified_base 15: mod_base = OTHER; note = thymine
  misc_feature 1..20: note = Description of Combined DNA/RNA Molecule: Synthetic oligonucleotide
  source 1..20: mol_type = other RNA
ggattgggagttacttgcca

SEQ ID NO: 1691 - RNA, 20 nt, synthetic construct
  misc_feature 1..20: note = Description of Artificial Sequence: Synthetic oligonucleotide
  source 1..20: mol_type = other RNA
gtcctggaaaccaggagtgc

SEQ ID NO: 1692 - RNA, 20 nt, synthetic construct
  modified_base 6: mod_base = OTHER; note = thymine
  modified_base 9..10: mod_base = OTHER; note = thymine
  modified_base 12: mod_base = OTHER; note = thymine
  misc_feature 1..20: note = Description of Combined DNA/RNA Molecule: Synthetic oligonucleotide
  source 1..20: mol_type = other RNA
caggctggttatgactcaga

SEQ ID NO: 1693 - RNA, 20 nt, synthetic construct
  modified_base 6..7: mod_base = OTHER; note = thymine
  modified_base 10..11: mod_base = OTHER; note = thymine
  misc_feature 1..20: note = Description of Combined DNA/RNA Molecule: Synthetic oligonucleotide
  source 1..20: mol_type = other RNA
gggagttacttgccaacttg

SEQ ID NO: 1694 - RNA, 20 nt, synthetic construct
  modified_base 7..8: mod_base = OTHER; note = thymine
  modified_base 11..12: mod_base = OTHER; note = thymine
  misc_feature 1..20: note = Description of Combined DNA/RNA Molecule: Synthetic oligonucleotide
  source 1..20: mol_type = other RNA
tgggagttacttgccaactt

SEQ ID NO: 1695 - RNA, 20 nt, synthetic construct
  modified_base 8..9: mod_base = OTHER; note = thymine
  modified_base 12..13: mod_base = OTHER; note = thymine
  misc_feature 1..20: note = Description of Combined DNA/RNA Molecule: Synthetic oligonucleotide
  source 1..20: mol_type = other RNA
ttgggagttacttgccaact

SEQ ID NO: 1696 - RNA, 20 nt, synthetic construct
  modified_base 7: mod_base = OTHER; note = thymine
  modified_base 14: mod_base = OTHER; note = thymine
  misc_feature 1..20: note = Description of Combined DNA/RNA Molecule: Synthetic oligonucleotide
  source 1..20: mol_type = other RNA
atttcctcaacactcagcct

SEQ ID NO: 1697 - RNA, 20 nt, synthetic construct
  modified_base 9: mod_base = OTHER; note = thymine
  modified_base 12: mod_base = OTHER; note = thymine
  misc_feature 1..20: note = Description of Combined DNA/RNA Molecule: Synthetic oligonucleotide
  source 1..20: mol_type = other RNA
cccctccctcatcaacaaaa

SEQ ID NO: 1698 - RNA, 20 nt, synthetic construct
  modified_base 6: mod_base = OTHER; note = thymine
  modified_base 11..12: mod_base = OTHER; note = thymine
  misc_feature 1..20: note = Description of Combined DNA/RNA Molecule: Synthetic oligonucleotide
  source 1..20: mol_type = other RNA
acatttccacttgccagtta

SEQ ID NO: 1699 - RNA, 20 nt, synthetic construct
  modified_base 8..9: mod_base = OTHER; note = thymine
  misc_feature 1..20: note = Description of Combined DNA/RNA Molecule: Synthetic oligonucleotide
  source 1..20: mol_type = other RNA
aaaaggcttagcgcccacct

SEQ ID NO: 1700 - RNA, 20 nt, synthetic construct
  modified_base 6: mod_base = OTHER; note = thymine
  modified_base 8: mod_base = OTHER; note = thymine
  misc_feature 1..20: note = Description of Combined DNA/RNA Molecule: Synthetic oligonucleotide
  source 1..20: mol_type = other RNA
acctgtctgaggcaaacgaa

SEQ ID NO: 1701 - RNA, 20 nt, synthetic construct
  modified_base 9..10: mod_base = OTHER; note = thymine
  modified_base 13..14: mod_base = OTHER; note = thymine
  misc_feature 1..20: note = Description of Combined DNA/RNA Molecule: Synthetic oligonucleotide
  source 1..20: mol_type = other RNA
attgggagttacttgccaac

SEQ ID NO: 1702 - RNA, 20 nt, synthetic construct
  misc_feature 1..20: note = Description of Artificial Sequence: Synthetic oligonucleotide
  source 1..20: mol_type = other RNA
tcaacaaaagcccaccctct

SEQ ID NO: 1703 - RNA, 20 nt, synthetic construct
  modified_base 7: mod_base = OTHER; note = thymine
  modified_base 10: mod_base = OTHER; note = thymine
  modified_base 14..15: mod_base = OTHER; note = thymine
  misc_feature 1..20: note = Description of Combined DNA/RNA Molecule: Synthetic oligonucleotide
  source 1..20: mol_type = other RNA
ctaagatgctagcttggcca

SEQ ID NO: 1704 - DNA, 20 bp, synthetic construct
  misc_feature 1..20: note = Description of Artificial Sequence: Synthetic oligonucleotide
  source 1..20: mol_type = other DNA
gggtcagctgccaatgctag

SEQ ID NO: 1705 - DNA, 20 bp, synthetic construct
  misc_feature 1..20: note = Description of Artificial Sequence: Synthetic oligonucleotide
  source 1..20: mol_type = other DNA
gggtcagctgccaatgctag

SEQ ID NO: 1706 - DNA, 20 bp, synthetic construct
  misc_feature 1..20: note = Description of Artificial Sequence: Synthetic oligonucleotide
  source 1..20: mol_type = other DNA
gggtcagctgccaatgctag

SEQ ID NO: 1707 - DNA, 20 bp, synthetic construct
  misc_feature 1..20: note = Description of Artificial Sequence: Synthetic oligonucleotide
  source 1..20: mol_type = other DNA
gggtcagctgccaatgctag

SEQ ID NO: 1708 - DNA, 20 bp, synthetic construct
  misc_feature 1..20: note = Description of Artificial Sequence: Synthetic oligonucleotide
  source 1..20: mol_type = other DNA
gggtcagctgccaatgctag

SEQ ID NO: 1709 - RNA, 20 nt, synthetic construct
  misc_feature 1..20: note = Description of Artificial Sequence: Synthetic oligonucleotide
  source 1..20: mol_type = other RNA
tcaaggaagatggcatttct

SEQ ID NO: 1710 - RNA, 20 nt, synthetic construct
  misc_feature 1..20: note = Description of Artificial Sequence: Synthetic oligonucleotide
  source 1..20: mol_type = other RNA
tcaaggaagatggcatttct

SEQ ID NO: 1711 - RNA, 20 nt, synthetic construct
  misc_feature 1..20: note = Description of Artificial Sequence: Synthetic oligonucleotide
  source 1..20: mol_type = other RNA
tcaaggaagatggcatttct

SEQ ID NO: 1712 - RNA, 20 nt, synthetic construct
  misc_feature 1..20: note = Description of Artificial Sequence: Synthetic oligonucleotide
  source 1..20: mol_type = other RNA
tcaaggaagatggcatttct

SEQ ID NO: 1713 - DNA, 20 bp, synthetic construct
  misc_feature 1..20: note = Description of Artificial Sequence: Synthetic oligonucleotide
  source 1..20: mol_type = other DNA
attaataaattgtcatcacc

SEQ ID NO: 1714 - DNA, 20 bp, synthetic construct
  misc_feature 1..20: note = Description of Artificial Sequence: Synthetic oligonucleotide
  source 1..20: mol_type = other DNA
attaataaattgtcatcacc

SEQ ID NO: 1715 - DNA, 20 bp, synthetic construct
  misc_feature 1..20: note = Description of Artificial Sequence: Synthetic oligonucleotide
  source 1..20: mol_type = other DNA
attaataaattgtcatcacc

SEQ ID NO: 1716 - RNA, 20 nt, synthetic construct
  misc_feature 1..20: note = Description of Artificial Sequence: Synthetic oligonucleotide
  source 1..20: mol_type = other RNA
ggtgatgacaatttattaat

SEQ ID NO: 1717 - RNA, 20 nt, synthetic construct
  misc_feature 1..20: note = Description of Artificial Sequence: Synthetic oligonucleotide
  source 1..20: mol_type = other RNA
ggtgatggcaatttattaat

SEQ ID NO: 1718 - RNA, 25 nt, synthetic construct
  misc_feature 1..25: note = Description of Artificial Sequence: Synthetic oligonucleotide
  source 1..25: mol_type = other RNA
tttggaagtctgcgcccttgtgccc

SEQ ID NO: 1719 - RNA, 25 nt, synthetic construct
  misc_feature 1..25: note = Description of Artificial Sequence: Synthetic oligonucleotide
  source 1..25: mol_type = other RNA
tttggaagtctgtgcccttgtgccc

SEQ ID NO: 1720 - DNA, 20 bp, synthetic construct
  misc_feature 1..20: note = Description of Artificial Sequence: Synthetic oligonucleotide
  source 1..20: mol_type = other DNA
gggcacaagggcacagactt

SEQ ID NO: 1721 - DNA, 20 bp, synthetic construct
  misc_feature 1..20: note = Description of Artificial Sequence: Synthetic oligonucleotide
  source 1..20: mol_type = other DNA
ggcacaagggcacagacttc

SEQ ID NO: 1722 - DNA, 20 bp, synthetic construct
  misc_feature 1..20: note = Description of Artificial Sequence: Synthetic oligonucleotide
  source 1..20: mol_type = other DNA
gcacaagggcacagacttcc

SEQ ID NO: 1723 - DNA, 20 bp, synthetic construct
  misc_feature 1..20: note = Description of Artificial Sequence: Synthetic oligonucleotide
  source 1..20: mol_type = other DNA
cacaagggcacagacttcca

SEQ ID NO: 1724 - DNA, 20 bp, synthetic construct
  misc_feature 1..20: note = Description of Artificial Sequence: Synthetic oligonucleotide
  source 1..20: mol_type = other DNA
acaagggcacagacttccaa

SEQ ID NO: 1725 - DNA, 20 bp, synthetic construct
  misc_feature 1..20: note = Description of Artificial Sequence: Synthetic oligonucleotide
  source 1..20: mol_type = other DNA
caagggcacagacttccaaa

SEQ ID NO: 1726 - DNA, 20 bp, synthetic construct
  misc_feature 1..20: note = Description of Artificial Sequence: Synthetic oligonucleotide
  source 1..20: mol_type = other DNA
gggcacaagggcacagactt

SEQ ID NO: 1727 - DNA, 20 bp, synthetic construct
  misc_feature 1..20: note = Description of Artificial Sequence: Synthetic oligonucleotide
  source 1..20: mol_type = other DNA
ggcacaagggcacagacttc

SEQ ID NO: 1728 - DNA, 20 bp, synthetic construct
  misc_feature 1..20: note = Description of Artificial Sequence: Synthetic oligonucleotide
  source 1..20: mol_type = other DNA
gcacaagggcacagacttcc

SEQ ID NO: 1729 - DNA, 20 bp, synthetic construct
  misc_feature 1..20: note = Description of Artificial Sequence: Synthetic oligonucleotide
  source 1..20: mol_type = other DNA
cacaagggcacagacttcca

SEQ ID NO: 1730 - DNA, 20 bp, synthetic construct
  misc_feature 1..20: note = Description of Artificial Sequence: Synthetic oligonucleotide
  source 1..20: mol_type = other DNA
acaagggcacagacttccaa

SEQ ID NO: 1731 - DNA, 20 bp, synthetic construct
  misc_feature 1..20: note = Description of Artificial Sequence: Synthetic oligonucleotide
  source 1..20: mol_type = other DNA
caagggcacagacttccaaa

SEQ ID NO: 1732 - RNA, 20 nt, synthetic construct
  misc_feature 1..20: note = Description of Artificial Sequence: Synthetic oligonucleotide
  source 1..20: mol_type = other RNA
gggcacaagggcacagactt

SEQ ID NO: 1733 - RNA, 20 nt, synthetic construct
  misc_feature 1..20: note = Description of Artificial Sequence: Synthetic oligonucleotide
  source 1..20: mol_type = other RNA
ggcacaagggcacagacttc

SEQ ID NO: 1734 - RNA, 20 nt, synthetic construct
  misc_feature 1..20: note = Description of Artificial Sequence: Synthetic oligonucleotide
  source 1..20: mol_type = other RNA
gcacaagggcacagacttcc

SEQ ID NO: 1735 - RNA, 20 nt, synthetic construct
  misc_feature 1..20: note = Description of Artificial Sequence: Synthetic oligonucleotide
  source 1..20: mol_type = other RNA
cacaagggcacagacttcca

SEQ ID NO: 1736 - RNA, 20 nt, synthetic construct
  modified_base 15: mod_base = OTHER; note = thymine
  misc_feature 1..20: note = Description of Combined DNA/RNA Molecule: Synthetic oligonucleotide
  source 1..20: mol_type = other RNA
acaagggcacagacttccaa

SEQ ID NO: 1737 - DNA, 20 bp, synthetic construct
  misc_feature 1..20: note = Description of Artificial Sequence: Synthetic oligonucleotide
  source 1..20: mol_type = other DNA
caagggcacagacttccaaa

SEQ ID NO: 1738 - RNA, 20 nt, synthetic construct
  misc_feature 1..20: note = Description of Artificial Sequence: Synthetic oligonucleotide
  source 1..20: mol_type = other RNA
gcacaagggcacagacttcc

SEQ ID NO: 1739 - RNA, 20 nt, synthetic construct
  misc_feature 1..20: note = Description of Artificial Sequence: Synthetic oligonucleotide
  source 1..20: mol_type = other RNA
cacaagggcacagacttcca

SEQ ID NO: 1740 - RNA, 20 nt, synthetic construct
  misc_feature 1..20: note = Description of Artificial Sequence: Synthetic oligonucleotide
  source 1..20: mol_type = other RNA
acaagggcacagacttccaa

SEQ ID NO: 1741 - RNA, 20 nt, synthetic construct
  misc_feature 1..20: note = Description of Artificial Sequence: Synthetic oligonucleotide
  source 1..20: mol_type = other RNA
caagggcacagacttccaaa

SEQ ID NO: 1742 - RNA, 20 nt, synthetic construct
  misc_feature 1..20: note = Description of Artificial Sequence: Synthetic oligonucleotide
  source 1..20: mol_type = other RNA
gcacaagggcacagacttcc

SEQ ID NO: 1743 - RNA, 20 nt, synthetic construct
  misc_feature 1..20: note = Description of Artificial Sequence: Synthetic oligonucleotide
  source 1..20: mol_type = other RNA
cacaagggcacagacttcca

SEQ ID NO: 1744 - RNA, 20 nt, synthetic construct
  misc_feature 1..20: note = Description of Artificial Sequence: Synthetic oligonucleotide
  source 1..20: mol_type = other RNA
acaagggcacagacttccaa

SEQ ID NO: 1745 - RNA, 20 nt, synthetic construct
  misc_feature 1..20: note = Description of Artificial Sequence: Synthetic oligonucleotide
  source 1..20: mol_type = other RNA
caagggcacagacttccaaa

SEQ ID NO: 1746 - RNA, 20 nt, synthetic construct
  misc_feature 1..20: note = Description of Artificial Sequence: Synthetic oligonucleotide
  source 1..20: mol_type = other RNA
gggcacaagggcacagactt

SEQ ID NO: 1747 - RNA, 20 nt, synthetic construct
  misc_feature 1..20: note = Description of Artificial Sequence: Synthetic oligonucleotide
  source 1..20: mol_type = other RNA
ggcacaagggcacagacttc

SEQ ID NO: 1748 - RNA, 20 nt, synthetic construct
  misc_feature 1..20: note = Description of Artificial Sequence: Synthetic oligonucleotide
  source 1..20: mol_type = other RNA
gcacaagggcacagacttcc

SEQ ID NO: 1749 - RNA, 20 nt, synthetic construct
  misc_feature 1..20: note = Description of Artificial Sequence: Synthetic oligonucleotide
  source 1..20: mol_type = other RNA
cacaagggcacagacttcca

SEQ ID NO: 1750 - RNA, 20 nt, synthetic construct
  modified_base 15: mod_base = OTHER; note = thymine
  misc_feature 1..20: note = Description of Combined DNA/RNA Molecule: Synthetic oligonucleotide
  source 1..20: mol_type = other RNA
acaagggcacagacttccaa

SEQ ID NO: 1751 - DNA, 20 bp, synthetic construct
  misc_feature 1..20: note = Description of Artificial Sequence: Synthetic oligonucleotide
  source 1..20: mol_type = other DNA
caagggcacagacttccaaa

SEQ ID NO: 1752 - DNA, 20 bp, synthetic construct
  misc_feature 1..20: note = Description of Artificial Sequence: Synthetic oligonucleotide
  source 1..20: mol_type = other DNA
gggcacaagggcacagactt

SEQ ID NO: 1753 - DNA, 20 bp, synthetic construct
  misc_feature 1..20: note = Description of Artificial Sequence: Synthetic oligonucleotide
  source 1..20: mol_type = other DNA
ggcacaagggcacagacttc

SEQ ID NO: 1754 - DNA, 20 bp, synthetic construct
  misc_feature 1..20: note = Description of Artificial Sequence: Synthetic oligonucleotide
  source 1..20: mol_type = other DNA
gcacaagggcacagacttcc

SEQ ID NO: 1755 - DNA, 20 bp, synthetic construct
  misc_feature 1..20: note = Description of Artificial Sequence: Synthetic oligonucleotide
  source 1..20: mol_type = other DNA
cacaagggcacagacttcca

SEQ ID NO: 1756 - DNA, 20 bp, synthetic construct
  misc_feature 1..20: note = Description of Artificial Sequence: Synthetic oligonucleotide
  source 1..20: mol_type = other DNA
acaagggcacagacttccaa

SEQ ID NO: 1757 - DNA, 20 bp, synthetic construct
  misc_feature 1..20: note = Description of Artificial Sequence: Synthetic oligonucleotide
  source 1..20: mol_type = other DNA
caagggcacagacttccaaa

SEQ ID NO: 1758 - RNA, 25 nt, synthetic construct
  misc_feature 1..25: note = Description of Artificial Sequence: Synthetic oligonucleotide
  source 1..25: mol_type = other RNA
tttggaagtctgcgcccttgtgccc

SEQ ID NO: 1759 - RNA, 25 nt, synthetic construct
  misc_feature 1..25: note = Description of Artificial Sequence: Synthetic oligonucleotide
  source 1..25: mol_type = other RNA
tttggaagtctgtgcccttgtgccc

SEQ ID NO: 1760 - DNA, 20 bp, synthetic construct
  misc_feature 1..20: note = Description of Artificial Sequence: Synthetic oligonucleotide
  source 1..20: mol_type = other DNA
gagcagctgcaacctggcaa

SEQ ID NO: 1761 - DNA, 20 bp, synthetic construct
  misc_feature 1..20: note = Description of Artificial Sequence: Synthetic oligonucleotide
  source 1..20: mol_type = other DNA
gggccaacagccagcctgca

SEQ ID NO: 1762 - RNA, 25 nt, synthetic construct
  misc_feature 1..25: note = Description of Artificial Sequence: Synthetic oligonucleotide
  source 1..25: mol_type = other RNA
ggttgttgccaggttacagctgctc

SEQ ID NO: 1763 - RNA, 25 nt, synthetic construct
  misc_feature 1..25: note = Description of Artificial Sequence: Synthetic oligonucleotide
  source 1..25: mol_type = other RNA
ggttgttgccaggttgcagctgctc

SEQ ID NO: 1764 - DNA, 20 bp, synthetic construct
  misc_feature 1..20: note = Description of Artificial Sequence: Synthetic oligonucleotide
  source 1..20: mol_type = other DNA
gagcagctgcaacctggcaa

SEQ ID NO: 1765 - DNA, 20 bp, synthetic construct
  misc_feature 1..20: note = Description of Artificial Sequence: Synthetic oligonucleotide
  source 1..20: mol_type = other DNA
agcagctgcaacctggcaac

SEQ ID NO: 1766 - DNA, 20 bp, synthetic construct
  misc_feature 1..20: note = Description of Artificial Sequence: Synthetic oligonucleotide
  source 1..20: mol_type = other DNA
gcagctgcaacctggcaaca

SEQ ID NO: 1767 - DNA, 20 bp, synthetic construct
  misc_feature 1..20: note = Description of Artificial Sequence: Synthetic oligonucleotide
  source 1..20: mol_type = other DNA
cagctgcaacctggcaacaa

SEQ ID NO: 1768 - DNA, 20 bp, synthetic construct
  misc_feature 1..20: note = Description of Artificial Sequence: Synthetic oligonucleotide
  source 1..20: mol_type = other DNA
agctgcaacctggcaacaac

SEQ ID NO: 1769 - DNA, 20 bp, synthetic construct
  misc_feature 1..20: note = Description of Artificial Sequence: Synthetic oligonucleotide
  source 1..20: mol_type = other DNA
gctgcaacctggcaacaacc

SEQ ID NO: 1770 - RNA, 25 nt, synthetic construct
  misc_feature 1..25: note = Description of Artificial Sequence: Synthetic oligonucleotide
  source 1..25: mol_type = other RNA
cctcctgcaggctgggtgttggccc

SEQ ID NO: 1771 - RNA, 25 nt, synthetic construct
  misc_feature 1..25: note = Description of Artificial Sequence: Synthetic oligonucleotide
  source 1..25: mol_type = other RNA
cctcctgcaggctggctgttggccc

SEQ ID NO: 1772 - DNA, 20 bp, synthetic construct
  misc_feature 1..20: note = Description of Artificial Sequence: Synthetic oligonucleotide
  source 1..20: mol_type = other DNA
gggccaacagccagcctgca

SEQ ID NO: 1773 - DNA, 20 bp, synthetic construct
  misc_feature 1..20: note = Description of Artificial Sequence: Synthetic oligonucleotide
  source 1..20: mol_type = other DNA
ggccaacagccagcctgcag

SEQ ID NO: 1774 - DNA, 20 bp, synthetic construct
  misc_feature 1..20: note = Description of Artificial Sequence: Synthetic oligonucleotide
  source 1..20: mol_type = other DNA
gccaacagccagcctgcagg

SEQ ID NO: 1775 - DNA, 20 bp, synthetic construct
  misc_feature 1..20: note = Description of Artificial Sequence: Synthetic oligonucleotide
  source 1..20: mol_type = other DNA
ccaacagccagcctgcagga

SEQ ID NO: 1776 - DNA, 20 bp, synthetic construct
  misc_feature 1..20: note = Description of Artificial Sequence: Synthetic oligonucleotide
  source 1..20: mol_type = other DNA
caacagccagcctgcaggag

SEQ ID NO: 1777 - DNA, 20 bp, synthetic construct
  misc_feature 1..20: note = Description of Artificial Sequence: Synthetic oligonucleotide
  source 1..20: mol_type = other DNA
aacagccagcctgcaggagg

SEQ ID NO: 1778 - RNA, 21 nt, synthetic construct
  modified_base 20..21: mod_base = OTHER; note = thymine
  misc_feature 1..21: note = Description of Combined DNA/RNA Molecule: Synthetic oligonucleotide
  source 1..21: mol_type = other RNA
ggcctttcactactcctactt

SEQ ID NO: 1779 - RNA, 21 nt, synthetic construct
  modified_base 20..21: mod_base = OTHER; note = thymine
  misc_feature 1..21: note = Description of Combined DNA/RNA Molecule: Synthetic oligonucleotide
  source 1..21: mol_type = other RNA
gtaggagtagtgaaaggcctt

SEQ ID NO: 1780 - DNA, 20 bp, synthetic construct
  misc_feature 1..20: note = Description of Artificial Sequence: Synthetic oligonucleotide
  source 1..20: mol_type = other DNA
gtaggagtagtgaaaggcca

SEQ ID NO: 1781 - DNA, 20 bp, synthetic construct
  misc_feature 1..20: note = Description of Artificial Sequence: Synthetic oligonucleotide
  source 1..20: mol_type = other DNA
gcagggcacaagggcacaga

SEQ ID NO: 1782 - DNA, 20 bp, synthetic construct
  misc_feature 1..20: note = Description of Artificial Sequence: Synthetic oligonucleotide
  source 1..20: mol_type = other DNA
cagggcacaagggcacagac

SEQ ID NO: 1783 - DNA, 20 bp, synthetic construct
  misc_feature 1..20: note = Description of Artificial Sequence: Synthetic oligonucleotide
  source 1..20: mol_type = other DNA
agggcacaagggcacagact

SEQ ID NO: 1784 - DNA, 20 bp, synthetic construct
  misc_feature 1..20: note = Description of Artificial Sequence: Synthetic oligonucleotide
  source 1..20: mol_type = other DNA
aagggcacagacttccaaag

SEQ ID NO: 1785 - DNA, 20 bp, synthetic construct
  misc_feature 1..20: note = Description of Artificial Sequence: Synthetic oligonucleotide
  source 1..20: mol_type = other DNA
agggcacagacttccaaagg

SEQ ID NO: 1786 - DNA, 20 bp, synthetic construct
  misc_feature 1..20: note = Description of Artificial Sequence: Synthetic oligonucleotide
  source 1..20: mol_type = other DNA
gggcacagacttccaaaggc

SEQ ID NO: 1787 - DNA, 20 bp, synthetic construct
  misc_feature 1..20: note = Description of Artificial Sequence: Synthetic oligonucleotide
  source 1..20: mol_type = other DNA
gagcagctgcaacctggcaa

SEQ ID NO: 1788 - DNA, 20 bp, synthetic construct
  misc_feature 1..20: note = Description of Artificial Sequence: Synthetic oligonucleotide
  source 1..20: mol_type = other DNA
agcagctgcaacctggcaac

SEQ ID NO: 1789 - DNA, 20 bp, synthetic construct
  misc_feature 1..20: note = Description of Artificial Sequence: Synthetic oligonucleotide
  source 1..20: mol_type = other DNA
gcagctgcaacctggcaaca

SEQ ID NO: 1790 - DNA, 20 bp, synthetic construct
  misc_feature 1..20: note = Description of Artificial Sequence: Synthetic oligonucleotide
  source 1..20: mol_type = other DNA
cagctgcaacctggcaacaa

SEQ ID NO: 1791 - DNA, 20 bp, synthetic construct
  misc_feature 1..20: note = Description of Artificial Sequence: Synthetic oligonucleotide
  source 1..20: mol_type = other DNA
agctgcaacctggcaacaac

SEQ ID NO: 1792 - DNA, 20 bp, synthetic construct
  misc_feature 1..20: note = Description of Artificial Sequence: Synthetic oligonucleotide
  source 1..20: mol_type = other DNA
gctgcaacctggcaacaacc

SEQ ID NO: 1793 - DNA, 20 bp, synthetic construct
  misc_feature 1..20: note = Description of Artificial Sequence: Synthetic oligonucleotide
  source 1..20: mol_type = other DNA
gagcagctgcaacctggcaa

SEQ ID NO: 1794 - DNA, 20 bp, synthetic construct
  misc_feature 1..20: note = Description of Artificial Sequence: Synthetic oligonucleotide
  source 1..20: mol_type = other DNA
agcagctgcaacctggcaac

SEQ ID NO: 1795 - DNA, 20 bp, synthetic construct
  misc_feature 1..20: note = Description of Artificial Sequence: Synthetic oligonucleotide
  source 1..20: mol_type = other DNA
gcagctgcaacctggcaaca

SEQ ID NO: 1796 - RNA, 20 nt, synthetic construct
  modified_base 12: mod_base = OTHER; note = thymine
  misc_feature 1..20: note = Description of Combined DNA/RNA Molecule: Synthetic oligonucleotide
  source 1..20: mol_type = other RNA
cagctgcaacctggcaacaa

SEQ ID NO: 1797 - RNA, 20 nt, synthetic construct
  modified_base 11: mod_base = OTHER; note = thymine
  misc_feature 1..20: note = Description of Combined DNA/RNA Molecule: Synthetic oligonucleotide
  source 1..20: mol_type = other RNA
agctgcaacctggcaacaac

SEQ ID NO: 1798 - RNA, 20 nt, synthetic construct
  modified_base 10: mod_base = OTHER; note = thymine
  misc_feature 1..20: note = Description of Combined DNA/RNA Molecule: Synthetic oligonucleotide
  source 1..20: mol_type = other RNA
gctgcaacctggcaacaacc

SEQ ID NO: 1799 - DNA, 20 bp, synthetic construct
  misc_feature 1..20: note = Description of Artificial Sequence: Synthetic oligonucleotide
  source 1..20: mol_type = other DNA
gagcagctgcaacctggcaa

SEQ ID NO: 1800 - DNA, 20 bp, synthetic construct
  misc_feature 1..20: note = Description of Artificial Sequence: Synthetic oligonucleotide
  source 1..20: mol_type = other DNA
agcagctgcaacctggcaac

SEQ ID NO: 1801 - DNA, 20 bp, synthetic construct
  misc_feature 1..20: note = Description of Artificial Sequence: Synthetic oligonucleotide
  source 1..20: mol_type = other DNA
gcagctgcaacctggcaaca

SEQ ID NO: 1802 - RNA, 20 nt, synthetic construct
  modified_base 12: mod_base = OTHER; note = thymine
  misc_feature 1..20: note = Description of Combined DNA/RNA Molecule: Synthetic oligonucleotide
  source 1..20: mol_type = other RNA
cagctgcaacctggcaacaa

SEQ ID NO: 1803 - RNA, 20 nt, synthetic construct
  modified_base 11: mod_base = OTHER; note = thymine
  misc_feature 1..20: note = Description of Combined DNA/RNA Molecule: Synthetic oligonucleotide
  source 1..20: mol_type = other RNA
agctgcaacctggcaacaac

SEQ ID NO: 1804 - RNA, 20 nt, synthetic construct
  modified_base 10: mod_base = OTHER; note = thymine
  misc_feature 1..20: note = Description of Combined DNA/RNA Molecule: Synthetic oligonucleotide
  source 1..20: mol_type = other RNA
gctgcaacctggcaacaacc

SEQ ID NO: 1805 - RNA, 20 nt, synthetic construct
  modified_base 8: mod_base = OTHER; note = thymine
  misc_feature 1..20: note = Description of Combined DNA/RNA Molecule: Synthetic oligonucleotide
  source 1..20: mol_type = other RNA
gagcagctgcaacctggcaa

SEQ ID NO: 1806 - RNA, 20 nt, synthetic construct
  modified_base 8: mod_base = OTHER; note = thymine
  misc_feature 1..20: note = Description of Combined DNA/RNA Molecule: Synthetic oligonucleotide
  source 1..20: mol_type = other RNA
gagcagctgcaacctggcaa

SEQ ID NO: 1807 - DNA, 20 bp, synthetic construct
  misc_feature 1..20: note = Description of Artificial Sequence: Synthetic oligonucleotide
  source 1..20: mol_type = other DNA
agcagctgcaacctggcaac

SEQ ID NO: 1808 - DNA, 20 bp, synthetic construct
  misc_feature 1..20: note = Description of Artificial Sequence: Synthetic oligonucleotide
  source 1..20: mol_type = other DNA
agcagctgcaacctggcaac

SEQ ID NO: 1809 - RNA, 20 nt, synthetic construct
  modified_base 6: mod_base = OTHER; note = thymine
  misc_feature 1..20: note = Description of Combined DNA/RNA Molecule: Synthetic oligonucleotide
  source 1..20: mol_type = other RNA
gcagctgcaacctggcaaca

SEQ ID NO: 1810 - RNA, 20 nt, synthetic construct
  modified_base 6: mod_base = OTHER; note = thymine
  misc_feature 1..20: note = Description of Combined DNA/RNA Molecule: Synthetic oligonucleotide
  source 1..20: mol_type = other RNA
gcagctgcaacctggcaaca

SEQ ID NO: 1811 - DNA, 20 bp, synthetic construct
  misc_feature 1..20: note = Description of Artificial Sequence: Synthetic oligonucleotide
  source 1..20: mol_type = other DNA
gagcagctgcaacctggcaa

SEQ ID NO: 1812 - DNA, 20 bp, synthetic construct
  misc_feature 1..20: note = Description of Artificial Sequence: Synthetic oligonucleotide
  source 1..20: mol_type = other DNA
agcagctgcaacctggcaac

SEQ ID NO: 1813 - DNA, 20 bp, synthetic construct
  misc_feature 1..20: note = Description of Artificial Sequence: Synthetic oligonucleotide
  source 1..20: mol_type = other DNA
gcagctgcaacctggcaaca

SEQ ID NO: 1814 - RNA, 20 nt, synthetic construct
  modified_base 12: mod_base = OTHER; note = thymine
  misc_feature 1..20: note = Description of Combined DNA/RNA Molecule: Synthetic oligonucleotide
  source 1..20: mol_type = other RNA
cagctgcaacctggcaacaa

SEQ ID NO: 1815 - RNA, 20 nt, synthetic construct
  modified_base 11: mod_base = OTHER; note = thymine
  misc_feature 1..20: note = Description of Combined DNA/RNA Molecule: Synthetic oligonucleotide
  source 1..20: mol_type = other RNA
agctgcaacctggcaacaac

SEQ ID NO: 1816 - RNA, 20 nt, synthetic construct
  modified_base 10: mod_base = OTHER; note = thymine
  misc_feature 1..20: note = Description of Combined DNA/RNA Molecule: Synthetic oligonucleotide
  source 1..20: mol_type = other RNA
gctgcaacctggcaacaacc

SEQ ID NO: 1817 - DNA, 20 bp, synthetic construct
  misc_feature 1..20: note = Description of Artificial Sequence: Synthetic oligonucleotide
  source 1..20: mol_type = other DNA
gggccaacagccagcctgca

SEQ ID NO: 1818 - DNA, 20 bp, synthetic construct
  misc_feature 1..20: note = Description of Artificial Sequence: Synthetic oligonucleotide
  source 1..20: mol_type = other DNA
ggccaacagccagcctgcag

SEQ ID NO: 1819 - DNA, 20 bp, synthetic construct
  misc_feature 1..20: note = Description of Artificial Sequence: Synthetic oligonucleotide
  source 1..20: mol_type = other DNA
gccaacagccagcctgcagg

SEQ ID NO: 1820 - DNA, 20 bp, synthetic construct
  misc_feature 1..20: note = Description of Artificial Sequence: Synthetic oligonucleotide
  source 1..20: mol_type = other DNA
ccaacagccagcctgcagga

SEQ ID NO: 1821 - DNA, 20 bp, synthetic construct
  misc_feature 1..20: note = Description of Artificial Sequence: Synthetic oligonucleotide
  source 1..20: mol_type = other DNA
caacagccagcctgcaggag

SEQ ID NO: 1822 - DNA, 20 bp, synthetic construct
  misc_feature 1..20: note = Description of Artificial Sequence: Synthetic oligonucleotide
  source 1..20: mol_type = other DNA
aacagccagcctgcaggagg

SEQ ID NO: 1823 - DNA, 20 bp, synthetic construct
  misc_feature 1..20: note = Description of Artificial Sequence: Synthetic oligonucleotide
  source 1..20: mol_type = other DNA
gggccaacagccagcctgca

SEQ ID NO: 1824 - DNA, 20 bp, synthetic construct
  misc_feature 1..20: note = Description of Artificial Sequence: Synthetic oligonucleotide
  source 1..20: mol_type = other DNA
ggccaacagccagcctgcag

SEQ ID NO: 1825 - DNA, 20 bp, synthetic construct
  misc_feature 1..20: note = Description of Artificial Sequence: Synthetic oligonucleotide
  source 1..20: mol_type = other DNA
gccaacagccagcctgcagg

SEQ ID NO: 1826 - DNA, 20 bp, synthetic construct
  misc_feature 1..20: note = Description of Artificial Sequence: Synthetic oligonucleotide
  source 1..20: mol_type = other DNA
ccaacagccagcctgcagga

SEQ ID NO: 1827 - DNA, 20 bp, synthetic construct
  misc_feature 1..20: note = Description of Artificial Sequence: Synthetic oligonucleotide
  source 1..20: mol_type = other DNA
caacagccagcctgcaggag

SEQ ID NO: 1828 - DNA, 20 bp, synthetic construct
  misc_feature 1..20: note = Description of Artificial Sequence: Synthetic oligonucleotide
  source 1..20: mol_type = other DNA
aacagccagcctgcaggagg

SEQ ID NO: 1829 - RNA, 20 nt, synthetic construct
  misc_feature 1..20: note = Description of Artificial Sequence: Synthetic oligonucleotide
  source 1..20: mol_type = other RNA
gggccaacagccagcctgca

SEQ ID NO: 1830 - RNA, 20 nt, synthetic construct
  misc_feature 1..20: note = Description of Artificial Sequence: Synthetic oligonucleotide
  source 1..20: mol_type = other RNA
ggccaacagccagcctgcag

SEQ ID NO: 1831 - DNA, 20 bp, synthetic construct
  misc_feature 1..20: note = Description of Artificial Sequence: Synthetic oligonucleotide
  source 1..20: mol_type = other DNA
gccaacagccagcctgcagg

SEQ ID NO: 1832 - DNA, 20 bp, synthetic construct
  misc_feature 1..20: note = Description of Artificial Sequence: Synthetic oligonucleotide
  source 1..20: mol_type = other DNA
ccaacagccagcctgcagga

SEQ ID NO: 1833 - DNA, 20 bp, synthetic construct
  misc_feature 1..20: note = Description of Artificial Sequence: Synthetic oligonucleotide
  source 1..20: mol_type = other DNA
caacagccagcctgcaggag

SEQ ID NO: 1834 - DNA, 20 bp, synthetic construct
  misc_feature 1..20: note = Description of Artificial Sequence: Synthetic oligonucleotide
  source 1..20: mol_type = other DNA
aacagccagcctgcaggagg

SEQ ID NO: 1835 - RNA, 20 nt, synthetic construct
  misc_feature 1..20: note = Description of Artificial Sequence: Synthetic oligonucleotide
  source 1..20: mol_type = other RNA
gggccaacagccagcctgca

SEQ ID NO: 1836 - RNA, 20 nt, synthetic construct
  misc_feature 1..20: note = Description of Artificial Sequence: Synthetic oligonucleotide
  source 1..20: mol_type = other RNA
gggccaacagccagcctgca

SEQ ID NO: 1837 - RNA, 20 nt, synthetic construct
  misc_feature 1..20: note = Description of Artificial Sequence: Synthetic oligonucleotide
  source 1..20: mol_type = other RNA
ggccaacagccagcctgcag

SEQ ID NO: 1838 - RNA, 20 nt, synthetic construct
  misc_feature 1..20: note = Description of Artificial Sequence: Synthetic oligonucleotide
  source 1..20: mol_type = other RNA
ggccaacagccagcctgcag

SEQ ID NO: 1839 - RNA, 20 nt, synthetic construct
  misc_feature 1..20: note = Description of Artificial Sequence: Synthetic oligonucleotide
  source 1..20: mol_type = other RNA
gccaacagccagcctgcagg

SEQ ID NO: 1840 - RNA, 20 nt, synthetic construct
  misc_feature 1..20: note = Description of Artificial Sequence: Synthetic oligonucleotide
  source 1..20: mol_type = other RNA
gccaacagccagcctgcagg

SEQ ID NO: 1841 - RNA, 20 nt, synthetic construct
  misc_feature 1..20: note = Description of Artificial Sequence: Synthetic oligonucleotide
  source 1..20: mol_type = other RNA
gggccaacagccagcctgca

SEQ ID NO: 1842 - RNA, 20 nt, synthetic construct
  misc_feature 1..20: note = Description of Artificial Sequence: Synthetic oligonucleotide
  source 1..20: mol_type = other RNA
ggccaacagccagcctgcag

SEQ ID NO: 1843 - DNA, 20 bp, synthetic construct
  misc_feature 1..20: note = Description of Artificial Sequence: Synthetic oligonucleotide
  source 1..20: mol_type = other DNA
gccaacagccagcctgcagg

SEQ ID NO: 1844 - DNA, 20 bp, synthetic construct
  misc_feature 1..20: note = Description of Artificial Sequence: Synthetic oligonucleotide
  source 1..20: mol_type = other DNA
ccaacagccagcctgcagga

SEQ ID NO: 1845 - DNA, 20 bp, synthetic construct
  misc_feature 1..20: note = Description of Artificial Sequence: Synthetic oligonucleotide
  source 1..20: mol_type = other DNA
caacagccagcctgcaggag

SEQ ID NO: 1846 - DNA, 20 bp, synthetic construct
  misc_feature 1..20: note = Description of Artificial Sequence: Synthetic oligonucleotide
  source 1..20: mol_type = other DNA
aacagccagcctgcaggagg

SEQ ID NO: 1847 - RNA, 20 nt, synthetic construct
  modified_base 8: mod_base = OTHER; note = thymine
  modified_base 11: mod_base = OTHER; note = thymine
  misc_feature 1..20: note = Description of Combined DNA/RNA Molecule: Synthetic oligonucleotide
  source 1..20: mol_type = other RNA
gtaggagtagtgaaaggcca

SEQ ID NO: 1848 - RNA, 20 nt, synthetic construct
  modified_base 8: mod_base = OTHER; note = thymine
  modified_base 11: mod_base = OTHER; note = thymine
  misc_feature 1..20: note = Description of Combined DNA/RNA Molecule: Synthetic oligonucleotide
  source 1..20: mol_type = other RNA
gtaggagtagtgaaaggcca

SEQ ID NO: 1849 - RNA, 20 nt, synthetic construct
  modified_base 8: mod_base = OTHER; note = thymine
  modified_base 11: mod_base = OTHER; note = thymine
  misc_feature 1..20: note = Description of Combined DNA/RNA Molecule: Synthetic oligonucleotide
  source 1..20: mol_type = other RNA
gtaggagtagtgaaaggcca

SEQ ID NO: 1850 - RNA, 20 nt, synthetic construct
  modified_base 8: mod_base = OTHER; note = thymine
  modified_base 10: mod_base = OTHER; note = thymine
  modified_base 13: mod_base = OTHER; note = thymine
  modified_base 15: mod_base = OTHER; note = thymine
  misc_feature 1..20: note = Description of Combined DNA/RNA Molecule: Synthetic oligonucleotide
  source 1..20: mol_type = other RNA
ctcttactgtgctgtggaca

SEQ ID NO: 1851 - RNA, 20 nt, synthetic construct
  modified_base 8: mod_base = OTHER; note = thymine
  modified_base 10: mod_base = OTHER; note = thymine
  modified_base 13: mod_base = OTHER; note = thymine
  modified_base 15: mod_base = OTHER; note = thymine
  misc_feature 1..20: note = Description of Combined DNA/RNA Molecule: Synthetic oligonucleotide
  source 1..20: mol_type = other RNA
ctcttactgtgctgtggaca

SEQ ID NO: 1852 - RNA, 20 nt, synthetic construct
  modified_base 8: mod_base = OTHER; note = thymine
  modified_base 10: mod_base = OTHER; note = thymine
  modified_base 13: mod_base = OTHER; note = thymine
  modified_base 15: mod_base = OTHER; note = thymine
  misc_feature 1..20: note = Description of Combined DNA/RNA Molecule: Synthetic oligonucleotide
  source 1..20: mol_type = other RNA
ctcttactgtgctgtggaca

SEQ ID NO: 1853 - DNA, 20 bp, synthetic construct
  misc_feature 1..20: note = Description of Artificial Sequence: Synthetic oligonucleotide
  source 1..20: mol_type = other DNA
gggcacaagggcacagactt

SEQ ID NO: 1854 - DNA, 20 bp, synthetic construct
  misc_feature 1..20: note = Description of Artificial Sequence: Synthetic oligonucleotide
  source 1..20: mol_type = other DNA
ggcacaagggcacagacttc

SEQ ID NO: 1855 - DNA, 20 bp, synthetic construct
  misc_feature 1..20: note = Description of Artificial Sequence: Synthetic oligonucleotide
  source 1..20: mol_type = other DNA
gcacaagggcacagacttcc

SEQ ID NO: 1856 - DNA, 20 bp, synthetic construct
  misc_feature 1..20: note = Description of Artificial Sequence: Synthetic oligonucleotide
  source 1..20: mol_type = other DNA
gggcacaagggcacagactt

SEQ ID NO: 1857 - DNA, 20 bp, synthetic construct
  misc_feature 1..20: note = Description of Artificial Sequence: Synthetic oligonucleotide
  source 1..20: mol_type = other DNA
ggcacaagggcacagacttc

SEQ ID NO: 1858 - DNA, 20 bp, synthetic construct
  misc_feature 1..20: note = Description of Artificial Sequence: Synthetic oligonucleotide
  source 1..20: mol_type = other DNA
gcacaagggcacagacttcc

SEQ ID NO: 1859 - RNA, 35 nt, synthetic construct
  misc_feature 1..35: note = Description of Artificial Sequence: Synthetic oligonucleotide
  source 1..35: mol_type = other RNA
gagcctttggaagtctgcgcccttgtgccctgcct

SEQ ID NO: 1860 - RNA, 35 nt, synthetic construct
  misc_feature 1..35: note = Description of Artificial Sequence: Synthetic oligonucleotide
  source 1..35: mol_type = other RNA
gagcctttggaagtctgtgcccttgtgccctgcct

SEQ ID NO: 1861 - RNA, 21 nt, synthetic construct
  misc_feature 1..21: note = Description of Artificial Sequence: Synthetic oligonucleotide
  source 1..21: mol_type = other RNA
cacacgggcacagacttccaa

SEQ ID NO: 1862 - RNA, 21 nt, synthetic construct
  misc_feature 1..21: note = Description of Artificial Sequence: Synthetic oligonucleotide
  source 1..21: mol_type = other RNA
ggaagtctgtgcccgtgtgcc

SEQ ID NO: 1863 - RNA, 20 nt, synthetic construct
  modified_base 10..11: mod_base = OTHER; note = thymine
  modified_base 13: mod_base = OTHER; note = thymine
  modified_base 16: mod_base = OTHER; note = thymine
  misc_feature 1..20: note = Description of Combined DNA/RNA Molecule: Synthetic oligonucleotide
  source 1..20: mol_type = other RNA
attaataaattgtcatcacc

SEQ ID NO: 1864 - RNA, 20 nt, synthetic construct
  modified_base 10..11: mod_base = OTHER; note = thymine
  modified_base 13: mod_base = OTHER; note = thymine
  modified_base 16: mod_base = OTHER; note = thymine
  misc_feature 1..20: note = Description of Combined DNA/RNA Molecule: Synthetic oligonucleotide
  source 1..20: mol_type = other RNA
attaataaattgtcatcacc

SEQ ID NO: 1865 - RNA, 20 nt, synthetic construct
  modified_base 10..11: mod_base = OTHER; note = thymine
  modified_base 13: mod_base = OTHER; note = thymine
  modified_base 16: mod_base = OTHER; note = thymine
  misc_feature 1..20: note = Description of Combined DNA/RNA Molecule: Synthetic oligonucleotide
  source 1..20: mol_type = other RNA
attaataaattgtcatcacc

SEQ ID NO: 1866 - RNA, 20 nt, synthetic construct
  modified_base 10..11: mod_base = OTHER; note = thymine
  modified_base 13: mod_base = OTHER; note = thymine
  modified_base 16: mod_base = OTHER; note = thymine
  misc_feature 1..20: note = Description of Combined DNA/RNA Molecule: Synthetic oligonucleotide
  source 1..20: mol_type = other RNA
attaataaattgtcatcacc

SEQ ID NO: 1867 - RNA, 20 nt, synthetic construct
  modified_base 10..11: mod_base = OTHER; note = thymine
  modified_base 13: mod_base = OTHER; note = thymine
  modified_base 16: mod_base = OTHER; note = thymine
  misc_feature 1..20: note = Description of Combined DNA/RNA Molecule: Synthetic oligonucleotide
  source 1..20: mol_type = other RNA
attaataaattgtcatcacc

SEQ ID NO: 1868 - RNA, 20 nt, synthetic construct
  modified_base 10..11: mod_base = OTHER; note = thymine
  modified_base 13: mod_base = OTHER; note = thymine
  modified_base 16: mod_base = OTHER; note = thymine
  misc_feature 1..20: note = Description of Combined DNA/RNA Molecule: Synthetic oligonucleotide
  source 1..20: mol_type = other RNA
attaataaattgtcatcacc

SEQ ID NO: 1869 - RNA, 20 nt, synthetic construct
  modified_base 10..11: mod_base = OTHER; note = thymine
  modified_base 13: mod_base = OTHER; note = thymine
  modified_base 16: mod_base = OTHER; note = thymine
  misc_feature 1..20: note = Description of Combined DNA/RNA Molecule: Synthetic oligonucleotide
  source 1..20: mol_type = other RNA
attaataaattgtcatcacc

SEQ ID NO: 1870 - RNA, 20 nt, synthetic construct
  modified_base 10..11: mod_base = OTHER; note = thymine
  modified_base 13: mod_base = OTHER; note = thymine
  modified_base 16: mod_base = OTHER; note = thymine
  misc_feature 1..20: note = Description of Combined DNA/RNA Molecule: Synthetic oligonucleotide
  source 1..20: mol_type = other RNA
attaataaattgtcatcacc

SEQ ID NO: 1871 - RNA, 20 nt, synthetic construct
  misc_feature 1..20: note = Description of Artificial Sequence: Synthetic oligonucleotide
  source 1..20: mol_type = other RNA
ggcacaagggcacagacttc

SEQ ID NO: 1872 - RNA, 20 nt, synthetic construct
  misc_feature 1..20: note = Description of Artificial Sequence: Synthetic oligonucleotide
  source 1..20: mol_type = other RNA
ggcacaagggcacagacttc

SEQ ID NO: 1873 - RNA, 20 nt, synthetic construct
  misc_feature 1..20: note = Description of Artificial Sequence: Synthetic oligonucleotide
  source 1..20: mol_type = other RNA
ggcacaagggcacagacttc

SEQ ID NO: 1874 - DNA, 20 bp, synthetic construct
  misc_feature 1..20: note = Description of Artificial Sequence: Synthetic oligonucleotide
  source 1..20: mol_type = other DNA
ggcacaagggcacagacttc

SEQ ID NO: 1875 - DNA, 20 bp, synthetic construct
  misc_feature 1..20: note = Description of Artificial Sequence: Synthetic oligonucleotide
  source 1..20: mol_type = other DNA
ggcacaagggcacagacttc

SEQ ID NO: 1876 - DNA, 20 bp, synthetic construct
  misc_feature 1..20: note = Description of Artificial Sequence: Synthetic oligonucleotide
  source 1..20: mol_type = other DNA
ggcacaagggcacagacttc

SEQ ID NO: 1877 - RNA, 20 nt, synthetic construct
  misc_feature 1..20: note = Description of Artificial Sequence: Synthetic oligonucleotide
  source 1..20: mol_type = other RNA
ggcacaagggcacagacttc

SEQ ID NO: 1878 - RNA, 20 nt, synthetic construct
  misc_feature 1..20: note = Description of Artificial Sequence: Synthetic oligonucleotide
  source 1..20: mol_type = other RNA
ggcacaagggcacagacttc

SEQ ID NO: 1879 - DNA, 20 bp, synthetic construct
  misc_feature 1..20: note = Description of Artificial Sequence: Synthetic oligonucleotide
  source 1..20: mol_type = other DNA
gcagggcacaagggcacaga

SEQ ID NO: 1880 - DNA, 20 bp, synthetic construct
  misc_feature 1..20: note = Description of Artificial Sequence: Synthetic oligonucleotide
  source 1..20: mol_type = other DNA
gcagggcacaagggcacaga

SEQ ID NO: 1881 - DNA, 20 bp, synthetic construct
  misc_feature 1..20: note = Description of Artificial Sequence: Synthetic oligonucleotide
  source 1..20: mol_type = other DNA
gcagggcacaagggcacaga

SEQ ID NO: 1882 - DNA, 20 bp, synthetic construct
  misc_feature 1..20: note = Description of Artificial Sequence: Synthetic oligonucleotide
  source 1..20: mol_type = other DNA
gcagggcacaagggcacaga

SEQ ID NO: 1883 - DNA, 20 bp, synthetic construct
  misc_feature 1..20: note = Description of Artificial Sequence: Synthetic oligonucleotide
  source 1..20: mol_type = other DNA
gcagggcacaagggcacaga

SEQ ID NO: 1884 - DNA, 20 bp, synthetic construct
  misc_feature 1..20: note = Description of Artificial Sequence: Synthetic oligonucleotide
  source 1..20: mol_type = other DNA
cagggcacaagggcacagac

SEQ ID NO: 1885 - DNA, 20 bp, synthetic construct
  misc_feature 1..20: note = Description of Artificial Sequence: Synthetic oligonucleotide
  source 1..20: mol_type = other DNA
cagggcacaagggcacagac

SEQ ID NO: 1886 - DNA, 20 bp, synthetic construct
  misc_feature 1..20: note = Description of Artificial Sequence: Synthetic oligonucleotide
  source 1..20: mol_type = other DNA
cagggcacaagggcacagac

SEQ ID NO: 1887 - DNA, 20 bp, synthetic construct
  misc_feature 1..20: note = Description of Artificial Sequence: Synthetic oligonucleotide
  source 1..20: mol_type = other DNA
cagggcacaagggcacagac

SEQ ID NO: 1888 - DNA, 20 bp, synthetic construct
  misc_feature 1..20: note = Description of Artificial Sequence: Synthetic oligonucleotide
  source 1..20: mol_type = other DNA
cagggcacaagggcacagac

SEQ ID NO: 1889 - DNA, 20 bp, synthetic construct
  misc_feature 1..20: note = Description of Artificial Sequence: Synthetic oligonucleotide
  source 1..20: mol_type = other DNA
agggcacaagggcacagact

SEQ ID NO: 1890 - DNA, 20 bp, synthetic construct
  misc_feature 1..20: note = Description of Artificial Sequence: Synthetic oligonucleotide
  source 1..20: mol_type = other DNA
agggcacaagggcacagact

SEQ ID NO: 1891 - DNA, 20 bp, synthetic construct
  misc_feature 1..20: note = Description of Artificial Sequence: Synthetic oligonucleotide
  source 1..20: mol_type = other DNA
agggcacaagggcacagact

SEQ ID NO: 1892 - RNA, 20 nt, synthetic construct
  misc_feature 1..20: note = Description of Artificial Sequence: Synthetic oligonucleotide
  source 1..20: mol_type = other RNA
agggcacaagggcacagact

SEQ ID NO: 1893 - RNA, 20 nt, synthetic construct
  misc_feature 1..20: note = Description of Artificial Sequence: Synthetic oligonucleotide
  source 1..20: mol_type = other RNA
agggcacaagggcacagact

SEQ ID NO: 1894 - DNA, 20 bp, synthetic construct
  misc_feature 1..20: note = Description of Artificial Sequence: Synthetic oligonucleotide
  source 1..20: mol_type = other DNA
aagggcacagacttccaaag

SEQ ID NO: 1895 - DNA, 20 bp, synthetic construct
  misc_feature 1..20: note = Description of Artificial Sequence: Synthetic oligonucleotide
  source 1..20: mol_type = other DNA
aagggcacagacttccaaag

SEQ ID NO: 1896 - DNA, 20 bp, synthetic construct
  misc_feature 1..20: note = Description of Artificial Sequence: Synthetic oligonucleotide
  source 1..20: mol_type = other DNA
aagggcacagacttccaaag

SEQ ID NO: 1897 - DNA, 20 bp, synthetic construct
  misc_feature 1..20: note = Description of Artificial Sequence: Synthetic oligonucleotide
  source 1..20: mol_type = other DNA
aagggcacagacttccaaag

SEQ ID NO: 1898 - DNA, 20 bp, synthetic construct
  misc_feature 1..20: note = Description of Artificial Sequence: Synthetic oligonucleotide
  source 1..20: mol_type = other DNA
aagggcacagacttccaaag

SEQ ID NO: 1899 - DNA, 20 bp, synthetic construct
  misc_feature 1..20: note = Description of Artificial Sequence: Synthetic oligonucleotide
  source 1..20: mol_type = other DNA
aagggcacagacttccaaag

SEQ ID NO: 1900 - DNA, 20 bp, synthetic construct
  misc_feature 1..20: note = Description of Artificial Sequence: Synthetic oligonucleotide
  source 1..20: mol_type = other DNA
aagggcacagacttccaaag

SEQ ID NO: 1901 - DNA, 20 bp, synthetic construct
  misc_feature 1..20: note = Description of Artificial Sequence: Synthetic oligonucleotide
  source 1..20: mol_type = other DNA
agggcacagacttccaaagg

SEQ ID NO: 1902 - DNA, 20 bp, synthetic construct
  misc_feature 1..20: note = Description of Artificial Sequence: Synthetic oligonucleotide
  source 1..20: mol_type = other DNA
agggcacagacttccaaagg

SEQ ID NO: 1903 - DNA, 20 bp, synthetic construct
  misc_feature 1..20: note = Description of Artificial Sequence: Synthetic oligonucleotide
  source 1..20: mol_type = other DNA
agggcacagacttccaaagg

SEQ ID NO: 1904 - DNA, 20 bp, synthetic construct
  misc_feature 1..20: note = Description of Artificial Sequence: Synthetic oligonucleotide
  source 1..20: mol_type = other DNA
agggcacagacttccaaagg

SEQ ID NO: 1905 - DNA, 20 bp, synthetic construct
  misc_feature 1..20: note = Description of Artificial Sequence: Synthetic oligonucleotide
  source 1..20: mol_type = other DNA
agggcacagacttccaaagg

SEQ ID NO: 1906 - DNA, 20 bp, synthetic construct
  misc_feature 1..20: note = Description of Artificial Sequence: Synthetic oligonucleotide
  source 1..20: mol_type = other DNA
agggcacagacttccaaagg

SEQ ID NO: 1907 - DNA, 20 bp, synthetic construct
  misc_feature 1..20: note = Description of Artificial Sequence: Synthetic oligonucleotide
  source 1..20: mol_type = other DNA
agggcacagacttccaaagg

SEQ ID NO: 1908 - DNA, 20 bp, synthetic construct
  misc_feature 1..20: note = Description of Artificial Sequence: Synthetic oligonucleotide
  source 1..20: mol_type = other DNA
gggcacagacttccaaaggc

SEQ ID NO: 1909 - DNA, 20 bp, synthetic construct
  misc_feature 1..20: note = Description of Artificial Sequence: Synthetic oligonucleotide
  source 1..20: mol_type = other DNA
gggcacagacttccaaaggc

SEQ ID NO: 1910 - DNA, 20 bp, synthetic construct
  misc_feature 1..20: note = Description of Artificial Sequence: Synthetic oligonucleotide
  source 1..20: mol_type = other DNA
gggcacagacttccaaaggc

SEQ ID NO: 1911 - DNA, 20 bp, synthetic construct
  misc_feature 1..20: note = Description of Artificial Sequence: Synthetic oligonucleotide
  source 1..20: mol_type = other DNA
gggcacagacttccaaaggc

SEQ ID NO: 1912 - DNA, 20 bp, synthetic construct
  misc_feature 1..20: note = Description of Artificial Sequence: Synthetic oligonucleotide
  source 1..20: mol_type = other DNA
gggcacagacttccaaaggc

SEQ ID NO: 1913 - RNA, 20 nt, synthetic construct
  modified_base 19: mod_base = OTHER; note = thymine
  misc_feature 1..20: note = Description of Combined DNA/RNA Molecule: Synthetic oligonucleotide
  source 1..20: mol_type = other RNA
ggcacaagggcacagacttc

SEQ ID NO: 1914 - DNA, 20 bp, synthetic construct
  misc_feature 1..20: note = Description of Artificial Sequence: Synthetic oligonucleotide
  source 1..20: mol_type = other DNA
ggcacaagggcacagacttc

SEQ ID NO: 1915 - RNA, 20 nt, synthetic construct
  misc_feature 1..20: note = Description of Artificial Sequence: Synthetic oligonucleotide
  source 1..20: mol_type = other RNA
ggcacaagggcacagacttc

SEQ ID NO: 1916 - RNA, 20 nt, synthetic construct
  modified_base 10..11: mod_base = OTHER; note = thymine
  modified_base 13: mod_base = OTHER; note = thymine
  modified_base 16: mod_base = OTHER; note = thymine
  misc_feature 1..20: note = Description of Combined DNA/RNA Molecule: Synthetic oligonucleotide
  source 1..20: mol_type = other RNA
attaataaattgtcatcacc

SEQ ID NO: 1917 - RNA, 20 nt, synthetic construct
  modified_base 10..11: mod_base = OTHER; note = thymine
  modified_base 13: mod_base = OTHER; note = thymine
  modified_base 16: mod_base = OTHER; note = thymine
  misc_feature 1..20: note = Description of Combined DNA/RNA Molecule: Synthetic oligonucleotide
  source 1..20: mol_type = other RNA
attaataaattgtcatcacc

SEQ ID NO: 1918 - RNA, 20 nt, synthetic construct
  misc_feature 1..20: note = Description of Artificial Sequence: Synthetic oligonucleotide
  source 1..20: mol_type = other RNA
ggcacaagggcacagacttc

SEQ ID NO: 1919 - RNA, 20 nt, synthetic construct
  misc_feature 1..20: note = Description of Artificial Sequence: Synthetic oligonucleotide
  source 1..20: mol_type = other RNA
ggcacaagggcacagacttc

SEQ ID NO: 1920 - DNA, 20 bp, synthetic construct
  misc_feature 1..20: note = Description of Artificial Sequence: Synthetic oligonucleotide
  source 1..20: mol_type = other DNA
ggcacaagggcacagacttc

SEQ ID NO: 1921 - DNA, 20 bp, synthetic construct
  misc_feature 1..20: note = Description of Artificial Sequence: Synthetic oligonucleotide
  source 1..20: mol_type = other DNA
ggcacaagggcacagacttc

SEQ ID NO: 1922 - DNA, 20 bp, synthetic construct
  misc_feature 1..20: note = Description of Artificial Sequence: Synthetic oligonucleotide
  source 1..20: mol_type = other DNA
ctcagtaacattgacaccac

SEQ ID NO: 1923 - RNA, 20 nt, synthetic construct
  modified_base 6: mod_base = OTHER; note = thymine
  modified_base 11..12: mod_base = OTHER; note = thymine
  misc_feature 1..20: note = Description of Combined DNA/RNA Molecule: Synthetic oligonucleotide
  source 1..20: mol_type = other RNA
ctcagtaacattgacaccac

SEQ ID NO: 1924 - RNA, 20 nt, synthetic construct
  modified_base 19: mod_base = OTHER; note = thymine
  misc_feature 1..20: note = Description of Combined DNA/RNA Molecule: Synthetic oligonucleotide
  source 1..20: mol_type = other RNA
ggcacaagggcacagacttc

SEQ ID NO: 1925 - DNA, 20 bp, synthetic construct
  misc_feature 1..20: note = Description of Artificial Sequence: Synthetic oligonucleotide
  source 1..20: mol_type = other DNA
ctcagtaacattgacaccac

SEQ ID NO: 1926 - DNA, 20 bp, synthetic construct
  misc_feature 1..20: note = Description of Artificial Sequence: Synthetic oligonucleotide
  source 1..20: mol_type = other DNA
ctcagtaacattgacaccac

SEQ ID NO: 1927 - RNA, 20 nt, synthetic construct
  misc_feature 1..20: note = Description of Artificial Sequence: Synthetic oligonucleotide
  source 1..20: mol_type = other RNA
gaagtctgtgcccttgtgcc

SEQ ID NO: 1928 - RNA, 20 nt, synthetic construct
  modified_base 19: mod_base = OTHER; note = thymine
  misc_feature 1..20: note = Description of Combined DNA/RNA Molecule: Synthetic oligonucleotide
  source 1..20: mol_type = other RNA
ggcacaagggcacagacttc

SEQ ID NO: 1929 - RNA, 20 nt, synthetic construct
  modified_base 1: mod_base = OTHER; note = thymine
  modified_base 3: mod_base = OTHER; note = thymine
  modified_base 6: mod_base = OTHER; note = thymine
  misc_feature 1..20: note = Description of Combined DNA/RNA Molecule: Synthetic oligonucleotide
  source 1..20: mol_type = other RNA
tgtcatcaccagaaaaagtc

SEQ ID NO: 1930 - RNA, 20 nt, synthetic construct
  modified_base 2: mod_base = OTHER; note = thymine
  modified_base 4: mod_base = OTHER; note = thymine
  modified_base 7: mod_base = OTHER; note = thymine
  misc_feature 1..20: note = Description of Combined DNA/RNA Molecule: Synthetic oligonucleotide
  source 1..20: mol_type = other RNA
ttgtcatcaccagaaaaagt

SEQ ID NO: 1931 - RNA, 20 nt, synthetic construct
  modified_base 1..2: mod_base = OTHER; note = thymine
  modified_base 4: mod_base = OTHER; note = thymine
  modified_base 7: mod_base = OTHER; note = thymine
  misc_feature 1..20: note = Description of Combined DNA/RNA Molecule: Synthetic oligonucleotide
  source 1..20: mol_type = other RNA
ttgtcatcaccagaaaaagt

SEQ ID NO: 1932 - RNA, 20 nt, synthetic construct
  modified_base 3: mod_base = OTHER; note = thymine
  modified_base 5: mod_base = OTHER; note = thymine
  modified_base 8: mod_base = OTHER; note = thymine
  misc_feature 1..20: note = Description of Combined DNA/RNA Molecule: Synthetic oligonucleotide
  source 1..20: mol_type = other RNA
attgtcatcaccagaaaaag

SEQ ID NO: 1933 - DNA, 20 bp, synthetic construct
  misc_feature 1..20: note = Description of Artificial Sequence: Synthetic oligonucleotide
  source 1..20: mol_type = other DNA
attgtcatcaccagaaaaag

SEQ ID NO: 1934 - RNA, 20 nt, synthetic construct
  modified_base 4: mod_base = OTHER; note = thymine
  modified_base 6: mod_base = OTHER; note = thymine
  modified_base 9: mod_base = OTHER; note = thymine
  misc_feature 1..20: note = Description of Combined DNA/RNA Molecule: Synthetic oligonucleotide
  source 1..20: mol_type = other RNA
aattgtcatcaccagaaaaa

SEQ ID NO: 1935 - DNA, 20 bp, synthetic construct
  misc_feature 1..20: note = Description of Artificial Sequence: Synthetic oligonucleotide
  source 1..20: mol_type = other DNA
aattgtcatcaccagaaaaa

SEQ ID NO: 1936 - DNA, 20 bp, synthetic construct
  misc_feature 1..20: note = Description of Artificial Sequence: Synthetic oligonucleotide
  source 1..20: mol_type = other DNA
aaattgtcatcaccagaaaa

SEQ ID NO: 1937 - RNA, 20 nt, synthetic construct
  modified_base 5: mod_base = OTHER; note = thymine
  modified_base 7: mod_base = OTHER; note = thymine
  modified_base 10: mod_base = OTHER; note = thymine
  misc_feature 1..20: note = Description of Combined DNA/RNA Molecule: Synthetic oligonucleotide
  source 1..20: mol_type = other RNA
aaattgtcatcaccagaaaa

SEQ ID NO: 1938 - RNA, 20 nt, synthetic construct
  modified_base 6: mod_base = OTHER; note = thymine
  modified_base 8: mod_base = OTHER; note = thymine
  modified_base 11: mod_base = OTHER; note = thymine
  misc_feature 1..20: note = Description of Combined DNA/RNA Molecule: Synthetic oligonucleotide
  source 1..20: mol_type = other RNA
taaattgtcatcaccagaaa

SEQ ID NO: 1939 - RNA, 20 nt, synthetic construct
  modified_base 6: mod_base = OTHER; note = thymine
  modified_base 8: mod_base = OTHER; note = thymine
  modified_base 11: mod_base = OTHER; note = thymine
  misc_feature 1..20: note = Description of Combined DNA/RNA Molecule: Synthetic oligonucleotide
  source 1..20: mol_type = other RNA
taaattgtcatcaccagaaa

SEQ ID NO: 1940 - RNA, 20 nt, synthetic construct
  modified_base 6..7: mod_base = OTHER; note = thymine
  modified_base 9: mod_base = OTHER; note = thymine
  modified_base 12: mod_base = OTHER; note = thymine
  misc_feature 1..20: note = Description of Combined DNA/RNA Molecule: Synthetic oligonucleotide
  source 1..20: mol_type = other RNA
ataaattgtcatcaccagaa

SEQ ID NO: 1941 - RNA, 20 nt, synthetic construct
  modified_base 6..7: mod_base = OTHER; note = thymine
  modified_base 9: mod_base = OTHER; note = thymine
  modified_base 12: mod_base = OTHER; note = thymine
  misc_feature 1..20: note = Description of Combined DNA/RNA Molecule: Synthetic oligonucleotide
  source 1..20: mol_type = other RNA
ataaattgtcatcaccagaa

SEQ ID NO: 1942 - RNA, 20 nt, synthetic construct
  modified_base 7..8: mod_base = OTHER; note = thymine
  modified_base 10: mod_base = OTHER; note = thymine
  modified_base 13: mod_base = OTHER; note = thymine
  misc_feature 1..20: note = Description of Combined DNA/RNA Molecule: Synthetic oligonucleotide
  source 1..20: mol_type = other RNA
aataaattgtcatcaccaga

SEQ ID NO: 1943 - RNA, 20 nt, synthetic construct
  modified_base 7..8: mod_base = OTHER; note = thymine
  modified_base 10: mod_base = OTHER; note = thymine
  modified_base 13: mod_base = OTHER; note = thymine
  misc_feature 1..20: note = Description of Combined DNA/RNA Molecule: Synthetic oligonucleotide
  source 1..20: mol_type = other RNA
aataaattgtcatcaccaga

SEQ ID NO: 1944 - RNA, 20 nt, synthetic construct
  modified_base 7..8: mod_base = OTHER; note = thymine
  modified_base 10: mod_base = OTHER; note = thymine
  modified_base 13: mod_base = OTHER; note = thymine
  misc_feature 1..20: note = Description of Combined DNA/RNA Molecule: Synthetic oligonucleotide
  source 1..20: mol_type = other RNA
aataaattgtcatcaccaga

SEQ ID NO: 1945 - RNA, 20 nt, synthetic construct
  modified_base 8..9: mod_base = OTHER; note = thymine
  modified_base 11: mod_base = OTHER; note = thymine
  modified_base 14: mod_base = OTHER; note = thymine
  misc_feature 1..20: note = Description of Combined DNA/RNA Molecule: Synthetic oligonucleotide
  source 1..20: mol_type = other RNA
taataaattgtcatcaccag

SEQ ID NO: 1946 - RNA, 20 nt, synthetic construct
  modified_base 8..9: mod_base = OTHER; note = thymine
  modified_base 11: mod_base = OTHER; note = thymine
  modified_base 14: mod_base = OTHER; note = thymine
  misc_feature 1..20: note = Description of Combined DNA/RNA Molecule: Synthetic oligonucleotide
  source 1..20: mol_type = other RNA
taataaattgtcatcaccag

SEQ ID NO: 1947 - RNA, 20 nt, synthetic construct
  modified_base 8..9: mod_base = OTHER; note = thymine
  modified_base 11: mod_base = OTHER; note = thymine
  modified_base 14: mod_base = OTHER; note = thymine
  misc_feature 1..20: note = Description of Combined DNA/RNA Molecule: Synthetic oligonucleotide
  source 1..20: mol_type = other RNA
taataaattgtcatcaccag

SEQ ID NO: 1948 - RNA, 20 nt, synthetic construct
  modified_base 8..9: mod_base = OTHER; note = thymine
  modified_base 11: mod_base = OTHER; note = thymine
  modified_base 14: mod_base = OTHER; note = thymine
  misc_feature 1..20: note = Description of Combined DNA/RNA Molecule: Synthetic oligonucleotide
  source 1..20: mol_type = other RNA
taataaattgtcatcaccag

SEQ ID NO: 1949 - RNA, 20 nt, synthetic construct
  modified_base 9..10: mod_base = OTHER; note = thymine
  modified_base 12: mod_base = OTHER; note = thymine
  modified_base 15: mod_base = OTHER; note = thymine
  misc_feature 1..20: note = Description of Combined DNA/RNA Molecule: Synthetic oligonucleotide
  source 1..20: mol_type = other RNA
ttaataaattgtcatcacca

SEQ ID NO: 1950 - RNA, 20 nt, synthetic construct
  modified_base 9..10: mod_base = OTHER; note = thymine
  modified_base 12: mod_base = OTHER; note = thymine
  modified_base 15: mod_base = OTHER; note = thymine
  misc_feature 1..20: note = Description of Combined DNA/RNA Molecule: Synthetic oligonucleotide
  source 1..20: mol_type = other RNA
ttaataaattgtcatcacca

SEQ ID NO: 1951 - RNA, 20 nt, synthetic construct
  modified_base 9..10: mod_base = OTHER; note = thymine
  modified_base 12: mod_base = OTHER; note = thymine
  modified_base 15: mod_base = OTHER; note = thymine
  misc_feature 1..20: note = Description of Combined DNA/RNA Molecule: Synthetic oligonucleotide
  source 1..20: mol_type = other RNA
ttaataaattgtcatcacca

SEQ ID NO: 1952 - RNA, 20 nt, synthetic construct
  modified_base 9..10: mod_base = OTHER; note = thymine
  modified_base 12: mod_base = OTHER; note = thymine
  modified_base 15: mod_base = OTHER; note = thymine
  misc_feature 1..20: note = Description of Combined DNA/RNA Molecule: Synthetic oligonucleotide
  source 1..20: mol_type = other RNA
ttaataaattgtcatcacca

SEQ ID NO: 1953 - RNA, 20 nt, synthetic construct
  modified_base 6: mod_base = OTHER; note = thymine
  modified_base 10..11: mod_base = OTHER; note = thymine
  modified_base 13: mod_base = OTHER; note = thymine
  modified_base 16: mod_base = OTHER; note = thymine
  misc_feature 1..20: note = Description of Combined DNA/RNA Molecule: Synthetic oligonucleotide
  source 1..20: mol_type = other RNA
attaataaattgtcatcacc

SEQ ID NO: 1954 - RNA, 20 nt, synthetic construct
  modified_base 6: mod_base = OTHER; note = thymine
  modified_base 10..11: mod_base = OTHER; note = thymine
  modified_base 13: mod_base = OTHER; note = thymine
  modified_base 16: mod_base = OTHER; note = thymine
  misc_feature 1..20: note = Description of Combined DNA/RNA Molecule: Synthetic oligonucleotide
  source 1..20: mol_type = other RNA
attaataaattgtcatcacc

SEQ ID NO: 1955 - RNA, 20 nt, synthetic construct
  modified_base 6: mod_base = OTHER; note = thymine
  modified_base 10..11: mod_base = OTHER; note = thymine
  modified_base 13: mod_base = OTHER; note = thymine
  modified_base 16: mod_base = OTHER; note = thymine
  misc_feature 1..20: note = Description of Combined DNA/RNA Molecule: Synthetic oligonucleotide
  source 1..20: mol_type = other RNA
attaataaattgtcatcacc

SEQ ID NO: 1956 - RNA, 20 nt, synthetic construct
  modified_base 6: mod_base = OTHER; note = thymine
  modified_base 10..11: mod_base = OTHER; note = thymine
  modified_base 13: mod_base = OTHER; note = thymine
  modified_base 16: mod_base = OTHER; note = thymine
  misc_feature 1..20: note = Description of Combined DNA/RNA Molecule: Synthetic oligonucleotide
  source 1..20: mol_type = other RNA
attaataaattgtcatcacc

SEQ ID NO: 1957 - RNA, 20 nt, synthetic construct
  modified_base 7: mod_base = OTHER; note = thymine
  modified_base 11..12: mod_base = OTHER; note = thymine
  modified_base 14: mod_base = OTHER; note = thymine
  modified_base 17: mod_base = OTHER; note = thymine
  misc_feature 1..20: note = Description of Combined DNA/RNA Molecule: Synthetic oligonucleotide
  source 1..20: mol_type = other RNA
tattaataaattgtcatcac

SEQ ID NO: 1958 - RNA, 20 nt, synthetic construct
  modified_base 7: mod_base = OTHER; note = thymine
  modified_base 11..12: mod_base = OTHER; note = thymine
  modified_base 14: mod_base = OTHER; note = thymine
  modified_base 17: mod_base = OTHER; note = thymine
  misc_feature 1..20: note = Description of Combined DNA/RNA Molecule: Synthetic oligonucleotide
  source 1..20: mol_type = other RNA
tattaataaattgtcatcac

SEQ ID NO: 1959 - RNA, 20 nt, synthetic construct
  modified_base 7: mod_base = OTHER; note = thymine
  modified_base 11..12: mod_base = OTHER; note = thymine
  modified_base 14: mod_base = OTHER; note = thymine
  modified_base 17: mod_base = OTHER; note = thymine
  misc_feature 1..20: note = Description of Combined DNA/RNA Molecule: Synthetic oligonucleotide
  source 1..20: mol_type = other RNA
tattaataaattgtcatcac

SEQ ID NO: 1960 - RNA, 20 nt, synthetic construct
  modified_base 8: mod_base = OTHER; note = thymine
  modified_base 12..13: mod_base = OTHER; note = thymine
  modified_base 15: mod_base = OTHER; note = thymine
  modified_base 18: mod_base = OTHER; note = thymine
  misc_feature 1..20: note = Description of Combined DNA/RNA Molecule: Synthetic oligonucleotide
  source 1..20: mol_type = other RNA
ctattaataaattgtcatca

SEQ ID NO: 1961 - RNA, 20 nt, synthetic construct
  modified_base 8: mod_base = OTHER; note = thymine
  modified_base 12..13: mod_base = OTHER; note = thymine
  modified_base 15: mod_base = OTHER; note = thymine
  modified_base 18: mod_base = OTHER; note = thymine
  misc_feature 1..20: note = Description of Combined DNA/RNA Molecule: Synthetic oligonucleotide
  source 1..20: mol_type = other RNA
ctattaataaattgtcatca

SEQ ID NO: 1962 - RNA, 20 nt, synthetic construct
  modified_base 6: mod_base = OTHER; note = thymine
  modified_base 9: mod_base = OTHER; note = thymine
  modified_base 13..14: mod_base = OTHER; note = thymine
  modified_base 16: mod_base = OTHER; note = thymine
  modified_base 19: mod_base = OTHER; note = thymine
  misc_feature 1..20: note = Description of Combined DNA/RNA Molecule: Synthetic oligonucleotide
  source 1..20: mol_type = other RNA
actattaataaattgtcatc

SEQ ID NO: 1963 - RNA, 20 nt, synthetic construct
  modified_base 1: mod_base = OTHER; note = thymine
  modified_base 3: mod_base = OTHER; note = thymine
  modified_base 6: mod_base = OTHER; note = thymine
  misc_feature 1..20: note = Description of Combined DNA/RNA Molecule: Synthetic oligonucleotide
  source 1..20: mol_type = other RNA
tgtcatcaccagaaaaagtc

SEQ ID NO: 1964 - RNA, 20 nt, synthetic construct
  modified_base 2: mod_base = OTHER; note = thymine
  modified_base 4: mod_base = OTHER; note = thymine
  modified_base 7: mod_base = OTHER; note = thymine
  misc_feature 1..20: note = Description of Combined DNA/RNA Molecule: Synthetic oligonucleotide
  source 1..20: mol_type = other RNA
ttgtcatcaccagaaaaagt

SEQ ID NO: 1965 - RNA, 20 nt, synthetic construct
  modified_base 1..2: mod_base = OTHER; note = thymine
  modified_base 4: mod_base = OTHER; note = thymine
  modified_base 7: mod_base = OTHER; note = thymine
  misc_feature 1..20: note = Description of Combined DNA/RNA Molecule: Synthetic oligonucleotide
  source 1..20: mol_type = other RNA
ttgtcatcaccagaaaaagt

SEQ ID NO: 1966 - RNA, 20 nt, synthetic construct
  modified_base 3: mod_base = OTHER; note = thymine
  modified_base 5: mod_base = OTHER; note = thymine
  modified_base 8: mod_base = OTHER; note = thymine
  misc_feature 1..20: note = Description of Combined DNA/RNA Molecule: Synthetic oligonucleotide
  source 1..20: mol_type = other RNA
attgtcatcaccagaaaaag

SEQ ID NO: 1967 - DNA, 20 bp, synthetic construct
  misc_feature 1..20: note = Description of Artificial Sequence: Synthetic oligonucleotide
  source 1..20: mol_type = other DNA
attgtcatcaccagaaaaag

SEQ ID NO: 1968 - RNA, 20 nt, synthetic construct
  modified_base 4: mod_base = OTHER; note = thymine
  modified_base 6: mod_base = OTHER; note = thymine
  modified_base 9: mod_base = OTHER; note = thymine
  misc_feature 1..20: note = Description of Combined DNA/RNA Molecule: Synthetic oligonucleotide
  source 1..20: mol_type = other RNA
aattgtcatcaccagaaaaa

SEQ ID NO: 1969 - DNA, 20 bp, synthetic construct
  misc_feature 1..20: note = Description of Artificial Sequence: Synthetic oligonucleotide
  source 1..20: mol_type = other DNA
aattgtcatcaccagaaaaa

SEQ ID NO: 1970 - DNA, 20 bp, synthetic construct
  misc_feature 1..20: note = Description of Artificial Sequence: Synthetic oligonucleotide
  source 1..20: mol_type = other DNA
aaattgtcatcaccagaaaa

SEQ ID NO: 1971 - RNA, 20 nt, synthetic construct
  modified_base 5: mod_base = OTHER; note = thymine
  modified_base 7: mod_base = OTHER; note = thymine
  modified_base 10: mod_base = OTHER; note = thymine
  misc_feature 1..20: note = Description of Combined DNA/RNA Molecule: Synthetic oligonucleotide
  source 1..20: mol_type = other RNA
aaattgtcatcaccagaaaa

SEQ ID NO: 1972 - RNA, 20 nt, synthetic construct
  modified_base 6: mod_base = OTHER; note = thymine
  modified_base 8: mod_base = OTHER; note = thymine
  modified_base 11: mod_base = OTHER; note = thymine
  misc_feature 1..20: note = Description of Combined DNA/RNA Molecule: Synthetic oligonucleotide
  source 1..20: mol_type = other RNA
taaattgtcatcaccagaaa

SEQ ID NO: 1973 - RNA, 20 nt, synthetic construct
  modified_base 6: mod_base = OTHER; note = thymine
  modified_base 8: mod_base = OTHER; note = thymine
  modified_base 11: mod_base = OTHER; note = thymine
  misc_feature 1..20: note = Description of Combined DNA/RNA Molecule: Synthetic oligonucleotide
  source 1..20: mol_type = other RNA
taaattgtcatcaccagaaa

SEQ ID NO: 1974 - RNA, 20 nt, synthetic construct
  modified_base 6..7: mod_base = OTHER; note = thymine
  modified_base 9: mod_base = OTHER; note = thymine
  modified_base 12: mod_base = OTHER; note = thymine
  misc_feature 1..20: note = Description of Combined DNA/RNA Molecule: Synthetic oligonucleotide
  source 1..20: mol_type = other RNA
ataaattgtcatcaccagaa

SEQ ID NO: 1975 - RNA, 20 nt, synthetic construct
  modified_base 6..7: mod_base = OTHER; note = thymine
  modified_base 9: mod_base = OTHER; note = thymine
  modified_base 12: mod_base = OTHER; note = thymine
  misc_feature 1..20: note = Description of Combined DNA/RNA Molecule: Synthetic oligonucleotide
  source 1..20: mol_type = other RNA
ataaattgtcatcaccagaa

SEQ ID NO: 1976 - RNA, 20 nt, synthetic construct
  modified_base 7..8: mod_base = OTHER; note = thymine
  modified_base 10: mod_base = OTHER; note = thymine
  modified_base 13: mod_base = OTHER; note = thymine
  misc_feature 1..20: note = Description of Combined DNA/RNA Molecule: Synthetic oligonucleotide
  source 1..20: mol_type = other RNA
aataaattgtcatcaccaga

SEQ ID NO: 1977 - RNA, 20 nt, synthetic construct
  modified_base 7..8: mod_base = OTHER; note = thymine
  modified_base 10: mod_base = OTHER; note = thymine
  modified_base 13: mod_base = OTHER; note = thymine
  misc_feature 1..20: note = Description of Combined DNA/RNA Molecule: Synthetic oligonucleotide
  source 1..20: mol_type = other RNA
aataaattgtcatcaccaga

SEQ ID NO: 1978 - RNA, 20 nt, synthetic construct
  modified_base 7..8: mod_base = OTHER; note = thymine
  modified_base 10: mod_base = OTHER; note = thymine
  modified_base 13: mod_base = OTHER; note = thymine
  misc_feature 1..20: note = Description of Combined DNA/RNA Molecule: Synthetic oligonucleotide
  source 1..20: mol_type = other RNA
aataaattgtcatcaccaga

SEQ ID NO: 1979 - RNA, 20 nt, synthetic construct
  modified_base 8..9: mod_base = OTHER; note = thymine
  modified_base 11: mod_base = OTHER; note = thymine
  modified_base 14: mod_base = OTHER; note = thymine
  misc_feature 1..20: note = Description of Combined DNA/RNA Molecule: Synthetic oligonucleotide
  source 1..20: mol_type = other RNA
taataaattgtcatcaccag

SEQ ID NO: 1980 - RNA, 20 nt, synthetic construct
  modified_base 8..9: mod_base = OTHER; note = thymine
  modified_base 11: mod_base = OTHER; note = thymine
  modified_base 14: mod_base = OTHER; note = thymine
  misc_feature 1..20: note = Description of Combined DNA/RNA Molecule: Synthetic oligonucleotide
  source 1..20: mol_type = other RNA
taataaattgtcatcaccag

SEQ ID NO: 1981 - RNA, 20 nt, synthetic construct
  modified_base 8..9: mod_base = OTHER; note = thymine
  modified_base 11: mod_base = OTHER; note = thymine
  modified_base 14: mod_base = OTHER; note = thymine
  misc_feature 1..20: note = Description of Combined DNA/RNA Molecule: Synthetic oligonucleotide
  source 1..20: mol_type = other RNA
taataaattgtcatcaccag

SEQ ID NO: 1982 - RNA, 20 nt, synthetic construct
  modified_base 8..9: mod_base = OTHER; note = thymine
  modified_base 11: mod_base = OTHER; note = thymine
  modified_base 14: mod_base = OTHER; note = thymine
  misc_feature 1..20: note = Description of Combined DNA/RNA Molecule: Synthetic oligonucleotide
  source 1..20: mol_type = other RNA
taataaattgtcatcaccag

SEQ ID NO: 1983 - RNA, 20 nt, synthetic construct
  modified_base 9..10: mod_base = OTHER; note = thymine
  modified_base 12: mod_base = OTHER; note = thymine
  modified_base 15: mod_base = OTHER; note = thymine
  misc_feature 1..20: note = Description of Combined DNA/RNA Molecule: Synthetic oligonucleotide
  source 1..20: mol_type = other RNA
ttaataaattgtcatcacca

SEQ ID NO: 1984 - RNA, 20 nt, synthetic construct
  modified_base 9..10: mod_base = OTHER; note = thymine
  modified_base 12: mod_base = OTHER; note = thymine
  modified_base 15: mod_base = OTHER; note = thymine
  misc_feature 1..20: note = Description of Combined DNA/RNA Molecule: Synthetic oligonucleotide
  source 1..20: mol_type = other RNA
ttaataaattgtcatcacca

SEQ ID NO: 1985 - RNA, 20 nt, synthetic construct
  modified_base 9..10: mod_base = OTHER; note = thymine
  modified_base 12: mod_base = OTHER; note = thymine
  modified_base 15: mod_base = OTHER; note = thymine
  misc_feature 1..20: note = Description of Combined DNA/RNA Molecule: Synthetic oligonucleotide
  source 1..20: mol_type = other RNA
ttaataaattgtcatcacca

SEQ ID NO: 1986 - RNA, 20 nt, synthetic construct
  modified_base 9..10: mod_base = OTHER; note = thymine
  modified_base 12: mod_base = OTHER; note = thymine
  modified_base 15: mod_base = OTHER; note = thymine
  misc_feature 1..20: note = Description of Combined DNA/RNA Molecule: Synthetic oligonucleotide
  source 1..20: mol_type = other RNA
ttaataaattgtcatcacca

SEQ ID NO: 1987 - RNA, 20 nt, synthetic construct
  modified_base 6: mod_base = OTHER; note = thymine
  modified_base 10..11: mod_base = OTHER; note = thymine
  modified_base 13: mod_base = OTHER; note = thymine
  modified_base 16: mod_base = OTHER; note = thymine
  misc_feature 1..20: note = Description of Combined DNA/RNA Molecule: Synthetic oligonucleotide
  source 1..20: mol_type = other RNA
attaataaattgtcatcacc

SEQ ID NO: 1988 - RNA, 20 nt, synthetic construct
  modified_base 6: mod_base = OTHER; note = thymine
  modified_base 10..11: mod_base = OTHER; note = thymine
  modified_base 13: mod_base = OTHER; note = thymine
  modified_base 16: mod_base = OTHER; note = thymine
  misc_feature 1..20: note = Description of Combined DNA/RNA Molecule: Synthetic oligonucleotide
  source 1..20: mol_type = other RNA
attaataaattgtcatcacc

SEQ ID NO: 1989 - RNA, 20 nt, synthetic construct
  modified_base 6: mod_base = OTHER; note = thymine
  modified_base 10..11: mod_base = OTHER; note = thymine
  modified_base 13: mod_base = OTHER; note = thymine
  modified_base 16: mod_base = OTHER; note = thymine
  misc_feature 1..20: note = Description of Combined DNA/RNA Molecule: Synthetic oligonucleotide
  source 1..20: mol_type = other RNA
attaataaattgtcatcacc

SEQ ID NO: 1990 - RNA, 20 nt, synthetic construct
  modified_base 6: mod_base = OTHER; note = thymine
  modified_base 10..11: mod_base = OTHER; note = thymine
  modified_base 13: mod_base = OTHER; note = thymine
  modified_base 16: mod_base = OTHER; note = thymine
  misc_feature 1..20: note = Description of Combined DNA/RNA Molecule: Synthetic oligonucleotide
  source 1..20: mol_type = other RNA
attaataaattgtcatcacc

SEQ ID NO: 1991 - RNA, 20 nt, synthetic construct
  modified_base 7: mod_base = OTHER; note = thymine
  modified_base 11..12: mod_base = OTHER; note = thymine
  modified_base 14: mod_base = OTHER; note = thymine
  modified_base 17: mod_base = OTHER; note = thymine
  misc_feature 1..20: note = Description of Combined DNA/RNA Molecule: Synthetic oligonucleotide
  source 1..20: mol_type = other RNA
tattaataaattgtcatcac

SEQ ID NO: 1992 - RNA, 20 nt, synthetic construct
  modified_base 7: mod_base = OTHER; note = thymine
  modified_base 11..12: mod_base = OTHER; note = thymine
  modified_base 14: mod_base = OTHER; note = thymine
  modified_base 17: mod_base = OTHER; note = thymine
  misc_feature 1..20: note = Description of Combined DNA/RNA Molecule: Synthetic oligonucleotide
  source 1..20: mol_type = other RNA
tattaataaattgtcatcac

SEQ ID NO: 1993 - RNA, 20 nt, synthetic construct
  modified_base 7: mod_base = OTHER; note = thymine
  modified_base 11..12: mod_base = OTHER; note = thymine
  modified_base 14: mod_base = OTHER; note = thymine
  modified_base 17: mod_base = OTHER; note = thymine
  misc_feature 1..20: note = Description of Combined DNA/RNA Molecule: Synthetic oligonucleotide
  source 1..20: mol_type = other RNA
tattaataaattgtcatcac

SEQ ID NO: 1994 - RNA, 20 nt, synthetic construct
  modified_base 8: mod_base = OTHER; note = thymine
  modified_base 12..13: mod_base = OTHER; note = thymine
  modified_base 15: mod_base = OTHER; note = thymine
  modified_base 18: mod_base = OTHER; note = thymine
  misc_feature 1..20: note = Description of Combined DNA/RNA Molecule: Synthetic oligonucleotide
  source 1..20: mol_type = other RNA
ctattaataaattgtcatca

SEQ ID NO: 1995 - RNA, 20 nt, synthetic construct
  modified_base 8: mod_base = OTHER; note = thymine
  modified_base 12..13: mod_base = OTHER; note = thymine
  modified_base 15: mod_base = OTHER; note = thymine
  modified_base 18: mod_base = OTHER; note = thymine
  misc_feature 1..20: note = Description of Combined DNA/RNA Molecule: Synthetic oligonucleotide
  source 1..20: mol_type = other RNA
ctattaataaattgtcatca

SEQ ID NO: 1996 - RNA, 20 nt, synthetic construct
  modified_base 6: mod_base = OTHER; note = thymine
  modified_base 9: mod_base = OTHER; note = thymine
  modified_base 13..14: mod_base = OTHER; note = thymine
  modified_base 16: mod_base = OTHER; note = thymine
  modified_base 19: mod_base = OTHER; note = thymine
  misc_feature 1..20: note = Description of Combined DNA/RNA Molecule: Synthetic oligonucleotide
  source 1..20: mol_type = other RNA
actattaataaattgtcatc

SEQ ID NO: 1997 - RNA, 32 nt, synthetic construct
  misc_feature 1..32: note = Description of Artificial Sequence: Synthetic oligonucleotide
  source 1..32: mol_type = other RNA
gactttttctggtgatggcaatttattaatag

SEQ ID NO: 1998 - RNA, 32 nt, synthetic construct
  misc_feature 1..32: note = Description of Artificial Sequence: Synthetic oligonucleotide
  source 1..32: mol_type = other RNA
gactttttctggtgatgacaatttattaatag

SEQ ID NO: 1999 - RNA, 20 nt, synthetic construct
  modified_base 6: mod_base = OTHER; note = thymine
  modified_base 8: mod_base = OTHER; note = thymine
  modified_base 11: mod_base = OTHER; note = thymine
  misc_feature 1..20: note = Description of Combined DNA/RNA Molecule: Synthetic oligonucleotide
  source 1..20: mol_type = other RNA
taaattgtcatcaccagaaa

SEQ ID NO: 2000 - RNA, 20 nt, synthetic construct
  modified_base 6..7: mod_base = OTHER; note = thymine
  modified_base 9: mod_base = OTHER; note = thymine
  modified_base 12: mod_base = OTHER; note = thymine
  misc_feature 1..20: note = Description of Combined DNA/RNA Molecule: Synthetic oligonucleotide
  source 1..20: mol_type = other RNA
ataaattgtcatcaccagaa

SEQ ID NO: 2001 - RNA, 20 nt, synthetic construct
  modified_base 7..8: mod_base = OTHER; note = thymine
  modified_base 10: mod_base = OTHER; note = thymine
  modified_base 13: mod_base = OTHER; note = thymine
  misc_feature 1..20: note = Description of Combined DNA/RNA Molecule: Synthetic oligonucleotide
  source 1..20: mol_type = other RNA
aataaattgtcatcaccaga

SEQ ID NO: 2002 - RNA, 20 nt, synthetic construct
  modified_base 8..9: mod_base = OTHER; note = thymine
  modified_base 11: mod_base = OTHER; note = thymine
  modified_base 14: mod_base = OTHER; note = thymine
  misc_feature 1..20: note = Description of Combined DNA/RNA Molecule: Synthetic oligonucleotide
  source 1..20: mol_type = other RNA
taataaattgtcatcaccag

SEQ ID NO: 2003 - RNA, 20 nt, synthetic construct
  modified_base 7..8: mod_base = OTHER; note = thymine
  modified_base 10: mod_base = OTHER; note = thymine
  modified_base 13: mod_base = OTHER; note = thymine
  misc_feature 1..20: note = Description of Combined DNA/RNA Molecule: Synthetic oligonucleotide
  source 1..20: mol_type = other RNA
aataaattgtcatcaccaga

SEQ ID NO: 2004 - RNA, 20 nt, synthetic construct
  modified_base 8..9: mod_base = OTHER; note = thymine
  modified_base 11: mod_base = OTHER; note = thymine
  modified_base 14: mod_base = OTHER; note = thymine
  misc_feature 1..20: note = Description of Combined DNA/RNA Molecule: Synthetic oligonucleotide
  source 1..20: mol_type = other RNA
taataaattgtcatcaccag

SEQ ID NO: 2005 - RNA, 20 nt, synthetic construct
  misc_feature 1..20: note = Description of Artificial Sequence: Synthetic oligonucleotide
  source 1..20: mol_type = other RNA
gcacaagggcacagacttcc

SEQ ID NO: 2006 - RNA, 20 nt, synthetic construct
  misc_feature 1..20: note = Description of Artificial Sequence: Synthetic oligonucleotide
  source 1..20: mol_type = other RNA
gcacaagggcacagacttcc

SEQ ID NO: 2007 - RNA, 20 nt, synthetic construct
  misc_feature 1..20: note = Description of Artificial Sequence: Synthetic oligonucleotide
  source 1..20: mol_type = other RNA
cacaagggcacagacttcca

SEQ ID NO: 2008 - RNA, 20 nt, synthetic construct
  misc_feature 1..20: note = Description of Artificial Sequence: Synthetic oligonucleotide
  source 1..20: mol_type = other RNA
cacaagggcacagacttcca

SEQ ID NO: 2009 - RNA, 20 nt, synthetic construct
  modified_base 6: mod_base = OTHER; note = thymine
  modified_base 8: mod_base = OTHER; note = thymine
  modified_base 11: mod_base = OTHER; note = thymine
  misc_feature 1..20: note = Description of Combined DNA/RNA Molecule: Synthetic oligonucleotide
  source 1..20: mol_type = other RNA
taaattgtcatcaccagaaa

SEQ ID NO: 2010 - RNA, 20 nt, synthetic construct
  modified_base 6..7: mod_base = OTHER; note = thymine
  modified_base 9: mod_base = OTHER; note = thymine
  modified_base 12: mod_base = OTHER; note = thymine
  misc_feature 1..20: note = Description of Combined DNA/RNA Molecule: Synthetic oligonucleotide
  source 1..20: mol_type = other RNA
ataaattgtcatcaccagaa

SEQ ID NO: 2011 - RNA, 20 nt, synthetic construct
  modified_base 7..8: mod_base = OTHER; note = thymine
  modified_base 10: mod_base = OTHER; note = thymine
  modified_base 13: mod_base = OTHER; note = thymine
  misc_feature 1..20: note = Description of Combined DNA/RNA Molecule: Synthetic oligonucleotide
  source 1..20: mol_type = other RNA
aataaattgtcatcaccaga

SEQ ID NO: 2012 - RNA, 20 nt, synthetic construct
  modified_base 8..9: mod_base = OTHER; note = thymine
  modified_base 11: mod_base = OTHER; note = thymine
  modified_base 14: mod_base = OTHER; note = thymine
  misc_feature 1..20: note = Description of Combined DNA/RNA Molecule: Synthetic oligonucleotide
  source 1..20: mol_type = other RNA
taataaattgtcatcaccag

SEQ ID NO: 2013 - RNA, 20 nt, synthetic construct
  misc_feature 1..20: note = Description of Artificial Sequence: Synthetic oligonucleotide
  source 1..20: mol_type = other RNA
tccccacagagggaggaagc

SEQ ID NO: 2014 - RNA, 20 nt, synthetic construct
  misc_feature 1..20: note = Description of Artificial Sequence: Synthetic oligonucleotide
  source 1..20: mol_type = other RNA
ctccccacagagggaggaag

SEQ ID NO: 2015 - RNA, 20 nt, synthetic construct
  misc_feature 1..20: note = Description of Artificial Sequence: Synthetic oligonucleotide
  source 1..20: mol_type = other RNA
cctccccacagagggaggaa

SEQ ID NO: 2016 - RNA, 20 nt, synthetic construct
  misc_feature 1..20: note = Description of Artificial Sequence: Synthetic oligonucleotide
  source 1..20: mol_type = other RNA
tcctccccacagagggagga

SEQ ID NO: 2017 - RNA, 20 nt, synthetic construct
  misc_feature 1..20: note = Description of Artificial Sequence: Synthetic oligonucleotide
  source 1..20: mol_type = other RNA
gtcctccccacagagggagg

SEQ ID NO: 2018 - RNA, 20 nt, synthetic construct
  modified_base 6: mod_base = OTHER; note = thymine
  misc_feature 1..20: note = Description of Combined DNA/RNA Molecule: Synthetic oligonucleotide
  source 1..20: mol_type = other RNA
ggtcctccccacagagggag

SEQ ID NO: 2019 - RNA, 20 nt, synthetic construct
  modified_base 7: mod_base = OTHER; note = thymine
  misc_feature 1..20: note = Description of Combined DNA/RNA Molecule: Synthetic oligonucleotide
  source 1..20: mol_type = other RNA
gggtcctccccacagaggga

SEQ ID NO: 2020 - RNA, 20 nt, synthetic construct
  modified_base 8: mod_base = OTHER; note = thymine
  misc_feature 1..20: note = Description of Combined DNA/RNA Molecule: Synthetic oligonucleotide
  source 1..20: mol_type = other RNA
cgggtcctccccacagaggg

SEQ ID NO: 2021 - RNA, 20 nt, synthetic construct
  modified_base 9: mod_base = OTHER; note = thymine
  misc_feature 1..20: note = Description of Combined DNA/RNA Molecule: Synthetic oligonucleotide
  source 1..20: mol_type = other RNA
acagtagatgagggagcagg

SEQ ID NO: 2022 - DNA, 20 bp, synthetic construct
  misc_feature 1..20: note = Description of Artificial Sequence: Synthetic oligonucleotide
  source 1..20: mol_type = other DNA
cacagtagatgagggagcag

SEQ ID NO: 2023 - DNA, 20 bp, synthetic construct
  misc_feature 1..20: note = Description of Artificial Sequence: Synthetic oligonucleotide
  source 1..20: mol_type = other DNA
acacagtagatgagggagca

SEQ ID NO: 2024 - DNA, 20 bp, synthetic construct
  misc_feature 1..20: note = Description of Artificial Sequence: Synthetic oligonucleotide
  source 1..20: mol_type = other DNA
cacacagtagatgagggagc

SEQ ID NO: 2025 - DNA, 20 bp, synthetic construct
  misc_feature 1..20: note = Description of Artificial Sequence: Synthetic oligonucleotide
  source 1..20: mol_type = other DNA
gcacacagtagatgagggag

SEQ ID NO: 2026 - RNA, 20 nt, synthetic construct
  modified_base 10: mod_base = OTHER; note = thymine
  modified_base 14: mod_base = OTHER; note = thymine
  misc_feature 1..20: note = Description of Combined DNA/RNA Molecule: Synthetic oligonucleotide
  source 1..20: mol_type = other RNA
tgcacacagtagatgaggga

SEQ ID NO: 2027 - RNA, 20 nt, synthetic construct
  modified_base 11: mod_base = OTHER; note = thymine
  modified_base 15: mod_base = OTHER; note = thymine
  misc_feature 1..20: note = Description of Combined DNA/RNA Molecule: Synthetic oligonucleotide
  source 1..20: mol_type = other RNA
gtgcacacagtagatgaggg

SEQ ID NO: 2028 - RNA, 20 nt, synthetic construct
  modified_base 12: mod_base = OTHER; note = thymine
  misc_feature 1..20: note = Description of Combined DNA/RNA Molecule: Synthetic oligonucleotide
  source 1..20: mol_type = other RNA
agtgcacacagtagatgagg

SEQ ID NO: 2029 - RNA, 20 nt, synthetic construct
  misc_feature 1..20: note = Description of Artificial Sequence: Synthetic oligonucleotide
  source 1..20: mol_type = other RNA
tccccacagagggaggaagc

SEQ ID NO: 2030 - RNA, 20 nt, synthetic construct
  misc_feature 1..20: note = Description of Artificial Sequence: Synthetic oligonucleotide
  source 1..20: mol_type = other RNA
ctccccacagagggaggaag

SEQ ID NO: 2031 - RNA, 20 nt, synthetic construct
  misc_feature 1..20: note = Description of Artificial Sequence: Synthetic oligonucleotide
  source 1..20: mol_type = other RNA
cctccccacagagggaggaa

SEQ ID NO: 2032 - RNA, 20 nt, synthetic construct
  misc_feature 1..20: note = Description of Artificial Sequence: Synthetic oligonucleotide
  source 1..20: mol_type = other RNA
tcctccccacagagggagga

SEQ ID NO: 2033 - RNA, 20 nt, synthetic construct
  misc_feature 1..20: note = Description of Artificial Sequence: Synthetic oligonucleotide
  source 1..20: mol_type = other RNA
gtcctccccacagagggagg

SEQ ID NO: 2034 - RNA, 20 nt, synthetic construct
  modified_base 6: mod_base = OTHER; note = thymine
  misc_feature 1..20: note = Description of Combined DNA/RNA Molecule: Synthetic oligonucleotide
  source 1..20: mol_type = other RNA
ggtcctccccacagagggag

SEQ ID NO: 2035 - RNA, 20 nt, synthetic construct
  modified_base 7: mod_base = OTHER; note = thymine
  misc_feature 1..20: note = Description of Combined DNA/RNA Molecule: Synthetic oligonucleotide
  source 1..20: mol_type = other RNA
gggtcctccccacagaggga

SEQ ID NO: 2036 - RNA, 20 nt, synthetic construct
  modified_base 8: mod_base = OTHER; note = thymine
  misc_feature 1..20: note = Description of Combined DNA/RNA Molecule: Synthetic oligonucleotide
  source 1..20: mol_type = other RNA
cgggtcctccccacagaggg

SEQ ID NO: 2037 - RNA, 20 nt, synthetic construct
  modified_base 9: mod_base = OTHER; note = thymine
  misc_feature 1..20: note = Description of Combined DNA/RNA Molecule: Synthetic oligonucleotide
  source 1..20: mol_type = other RNA
acagtagatgagggagcagg

SEQ ID NO: 2038 - DNA, 20 bp, synthetic construct
  misc_feature 1..20: note = Description of Artificial Sequence: Synthetic oligonucleotide
  source 1..20: mol_type = other DNA
cacagtagatgagggagcag

SEQ ID NO: 2039 - DNA, 20 bp, synthetic construct
  misc_feature 1..20: note = Description of Artificial Sequence: Synthetic oligonucleotide
  source 1..20: mol_type = other DNA
acacagtagatgagggagca

SEQ ID NO: 2040 - DNA, 20 bp, synthetic construct
  misc_feature 1..20: note = Description of Artificial Sequence: Synthetic oligonucleotide
  source 1..20: mol_type = other DNA
cacacagtagatgagggagc

SEQ ID NO: 2041 - DNA, 20 bp, synthetic construct
  misc_feature 1..20: note = Description of Artificial Sequence: Synthetic oligonucleotide
  source 1..20: mol_type = other DNA
gcacacagtagatgagggag

SEQ ID NO: 2042 - RNA, 20 nt, synthetic construct
  modified_base 10: mod_base = OTHER; note = thymine
  modified_base 14: mod_base = OTHER; note = thymine
  misc_feature 1..20: note = Description of Combined DNA/RNA Molecule: Synthetic oligonucleotide
  source 1..20: mol_type = other RNA
tgcacacagtagatgaggga

SEQ ID NO: 2043 - RNA, 20 nt, synthetic construct
  modified_base 11: mod_base = OTHER; note = thymine
  modified_base 15: mod_base = OTHER; note = thymine
  misc_feature 1..20: note = Description of Combined DNA/RNA Molecule: Synthetic oligonucleotide
  source 1..20: mol_type = other RNA
gtgcacacagtagatgaggg

SEQ ID NO: 2044 - RNA, 20 nt, synthetic construct
  modified_base 12: mod_base = OTHER; note = thymine
  misc_feature 1..20: note = Description of Combined DNA/RNA Molecule: Synthetic oligonucleotide
  source 1..20: mol_type = other RNA
agtgcacacagtagatgagg

SEQ ID NO: 2045 - DNA, 20 bp, synthetic construct
  misc_feature 1..20: note = Description of Artificial Sequence: Synthetic oligonucleotide
  source 1..20: mol_type = other DNA
ggcacaagggcacagacttc

SEQ ID NO: 2046 - RNA, 20 nt, synthetic construct
  misc_feature 1..20: note = Description of Artificial Sequence: Synthetic oligonucleotide
  source 1..20: mol_type = other RNA
ggcacaagggcacagacttc

SEQ ID NO: 2047 - RNA, 20 nt, synthetic construct
  modified_base 7: mod_base = OTHER; note = thymine
  misc_feature 1..20: note = Description of Combined DNA/RNA Molecule: Synthetic oligonucleotide
  source 1..20: mol_type = other RNA
gggtcctccccacagaggga

SEQ ID NO: 2048 - RNA, 20 nt, synthetic construct
  modified_base 7: mod_base = OTHER; note = thymine
  misc_feature 1..20: note = Description of Combined DNA/RNA Molecule: Synthetic oligonucleotide
  source 1..20: mol_type = other RNA
gggtcctccccacagaggga

SEQ ID NO: 2049 - RNA, 20 nt, synthetic construct
  modified_base 7: mod_base = OTHER; note = thymine
  misc_feature 1..20: note = Description of Combined DNA/RNA Molecule: Synthetic oligonucleotide
  source 1..20: mol_type = other RNA
gggtcctccccacagaggga

SEQ ID NO: 2050 - RNA, 20 nt, synthetic construct
  modified_base 7: mod_base = OTHER; note = thymine
  misc_feature 1..20: note = Description of Combined DNA/RNA Molecule: Synthetic oligonucleotide
  source 1..20: mol_type = other RNA
gggtcctccccacagaggga

SEQ ID NO: 2051 - RNA, 20 nt, synthetic construct
  modified_base 7: mod_base = OTHER; note = thymine
  misc_feature 1..20: note = Description of Combined DNA/RNA Molecule: Synthetic oligonucleotide
  source 1..20: mol_type = other RNA
gggttctccccacagaggga

SEQ ID NO: 2052 - RNA, 20 nt, synthetic construct
  misc_feature 1..20: note = Description of Artificial Sequence: Synthetic oligonucleotide
  source 1..20: mol_type = other RNA
ggcacaagggcacagacttc

SEQ ID NO: 2053 - RNA, 20 nt, synthetic construct
  misc_feature 1..20: note = Description of Artificial Sequence: Synthetic oligonucleotide
  source 1..20: mol_type = other RNA
ggcacaagggcacagacttc

SEQ ID NO: 2054 - RNA, 20 nt, synthetic construct
  misc_feature 1..20: note = Description of Artificial Sequence: Synthetic oligonucleotide
  source 1..20: mol_type = other RNA
ggcacaagggcacagacttc

SEQ ID NO: 2055 - RNA, 20 nt, synthetic construct
  misc_feature 1..20: note = Description of Artificial Sequence: Synthetic oligonucleotide
  source 1..20: mol_type = other RNA
ggcacaagggcacagacttc

SEQ ID NO: 2056 - RNA, 20 nt, synthetic construct
  misc_feature 1..20: note = Description of Artificial Sequence: Synthetic oligonucleotide
  source 1..20: mol_type = other RNA
ggcacaagggcacagacttc

SEQ ID NO: 2057 - RNA, 20 nt, synthetic construct
  misc_feature 1..20: note = Description of Artificial Sequence: Synthetic oligonucleotide
  source 1..20: mol_type = other RNA
ggcacaagggcacagacttc

SEQ ID NO: 2058 - RNA, 20 nt, synthetic construct
  misc_feature 1..20: note = Description of Artificial Sequence: Synthetic oligonucleotide
  source 1..20: mol_type = other RNA
ggcacaagggcacagacttc

SEQ ID NO: 2059 - RNA, 20 nt, synthetic construct
  misc_feature 1..20: note = Description of Artificial Sequence: Synthetic oligonucleotide
  source 1..20: mol_type = other RNA
ggcacaagggcacagacttc

SEQ ID NO: 2060 - RNA, 20 nt, synthetic construct
  misc_feature 1..20: note = Description of Artificial Sequence: Synthetic oligonucleotide
  source 1..20: mol_type = other RNA
ggcacaagggcacagacttc

SEQ ID NO: 2061 - RNA, 20 nt, synthetic construct
  misc_feature 1..20: note = Description of Artificial Sequence: Synthetic oligonucleotide
  source 1..20: mol_type = other RNA
ggcacaagggcacagacttc

SEQ ID NO: 2062 - RNA, 20 nt, synthetic construct
  misc_feature 1..20: note = Description of Artificial Sequence: Synthetic oligonucleotide
  source 1..20: mol_type = other RNA
ggcacaagggcacagacttc

SEQ ID NO: 2063 - RNA, 20 nt, synthetic construct
  misc_feature 1..20: note = Description of Artificial Sequence: Synthetic oligonucleotide
  source 1..20: mol_type = other RNA
ggcacaagggcacagacttc

SEQ ID NO: 2064 - RNA, 20 nt, synthetic construct
  misc_feature 1..20: note = Description of Artificial Sequence: Synthetic oligonucleotide
  source 1..20: mol_type = other RNA
ggcacaagggcacagacttc

SEQ ID NO: 2065 - DNA, 20 bp, synthetic construct
  misc_feature 1..20: note = Description of Artificial Sequence: Synthetic oligonucleotide
  source 1..20: mol_type = other DNA
attaataaattgtcatcacc

SEQ ID NO: 2066 - DNA, 20 bp, synthetic construct
  misc_feature 1..20: note = Description of Artificial Sequence: Synthetic oligonucleotide
  source 1..20: mol_type = other DNA
attaataaattgtcatcacc

SEQ ID NO: 2067 - DNA, 20 bp, synthetic construct
  misc_feature 1..20: note = Description of Artificial Sequence: Synthetic oligonucleotide
  source 1..20: mol_type = other DNA
attaataaattgtcatcacc

SEQ ID NO: 2068 - RNA, 20 nt, synthetic construct
  misc_feature 1..20: note = Description of Artificial Sequence: Synthetic oligonucleotide
  source 1..20: mol_type = other RNA
ggtgatgacaatttattaat

SEQ ID NO: 2069 - RNA, 20 nt, synthetic construct
  misc_feature 1..20: note = Description of Artificial Sequence: Synthetic oligonucleotide
  source 1..20: mol_type = other RNA
ggtgatggcaatttattaat

SEQ ID NO: 2070 - RNA, 25 nt, synthetic construct
  misc_feature 1..25: note = Description of Artificial Sequence: Synthetic oligonucleotide
  source 1..25: mol_type = other RNA
tttggaagtctgcgcccttgtgccc

SEQ ID NO: 2071 - RNA, 25 nt, synthetic construct
  misc_feature 1..25: note = Description of Artificial Sequence: Synthetic oligonucleotide
  source 1..25: mol_type = other RNA
tttggaagtctgtgcccttgtgccc

SEQ ID NO: 2072 - DNA, 20 bp, synthetic construct
  misc_feature 1..20: note = Description of Artificial Sequence: Synthetic oligonucleotide
  source 1..20: mol_type = other DNA
gggcacaagggcacagactt

SEQ ID NO: 2073 - DNA, 20 bp, synthetic construct
  misc_feature 1..20: note = Description of Artificial Sequence: Synthetic oligonucleotide
  source 1..20: mol_type = other DNA
ggcacaagggcacagacttc

SEQ ID NO: 2074 - DNA, 20 bp, synthetic construct
  misc_feature 1..20: note = Description of Artificial Sequence: Synthetic oligonucleotide
  source 1..20: mol_type = other DNA
gcacaagggcacagacttcc

SEQ ID NO: 2075 - DNA, 20 bp, synthetic construct
  misc_feature 1..20: note = Description of Artificial Sequence: Synthetic oligonucleotide
  source 1..20: mol_type = other DNA
cacaagggcacagacttcca

SEQ ID NO: 2076 - DNA, 20 bp, synthetic construct
  misc_feature 1..20: note = Description of Artificial Sequence: Synthetic oligonucleotide
  source 1..20: mol_type = other DNA
acaagggcacagacttccaa

SEQ ID NO: 2077 - DNA, 20 bp, synthetic construct
  misc_feature 1..20: note = Description of Artificial Sequence: Synthetic oligonucleotide
  source 1..20: mol_type = other DNA
caagggcacagacttccaaa

SEQ ID NO: 2078 - DNA, 20 bp, synthetic construct
  misc_feature 1..20: note = Description of Artificial Sequence: Synthetic oligonucleotide
  source 1..20: mol_type = other DNA
gggcacaagggcacagactt

SEQ ID NO: 2079 - DNA, 20 bp, synthetic construct
  misc_feature 1..20: note = Description of Artificial Sequence: Synthetic oligonucleotide
  source 1..20: mol_type = other DNA
ggcacaagggcacagacttc

SEQ ID NO: 2080 - DNA, 20 bp, synthetic construct
  misc_feature 1..20: note = Description of Artificial Sequence: Synthetic oligonucleotide
  source 1..20: mol_type = other DNA
gcacaagggcacagacttcc

SEQ ID NO: 2081 - DNA, 20 bp, synthetic construct
  misc_feature 1..20: note = Description of Artificial Sequence: Synthetic oligonucleotide
  source 1..20: mol_type = other DNA
cacaagggcacagacttcca

SEQ ID NO: 2082 - DNA, 20 bp, synthetic construct
  misc_feature 1..20: note = Description of Artificial Sequence: Synthetic oligonucleotide
  source 1..20: mol_type = other DNA
acaagggcacagacttccaa

SEQ ID NO: 2083 - DNA, 20 bp, synthetic construct
  misc_feature 1..20: note = Description of Artificial Sequence: Synthetic oligonucleotide
  source 1..20: mol_type = other DNA
caagggcacagacttccaaa

SEQ ID NO: 2084 - RNA, 20 nt, synthetic construct
  misc_feature 1..20: note = Description of Artificial Sequence: Synthetic oligonucleotide
  source 1..20: mol_type = other RNA
gggcacaagggcacagactt

SEQ ID NO: 2085 - RNA, 20 nt, synthetic construct
  misc_feature 1..20: note = Description of Artificial Sequence: Synthetic oligonucleotide
  source 1..20: mol_type = other RNA
ggcacaagggcacagacttc

SEQ ID NO: 2086 - RNA, 20 nt, synthetic construct
  misc_feature 1..20: note = Description of Artificial Sequence: Synthetic oligonucleotide
  source 1..20: mol_type = other RNA
gcacaagggcacagacttcc

SEQ ID NO: 2087 - RNA, 20 nt, synthetic construct
  misc_feature 1..20: note = Description of Artificial Sequence: Synthetic oligonucleotide
  source 1..20: mol_type = other RNA
cacaagggcacagacttcca

SEQ ID NO: 2088 - RNA, 20 nt, synthetic construct
  modified_base 15: mod_base = OTHER; note = thymine
  misc_feature 1..20: note = Description of Combined DNA/RNA Molecule: Synthetic oligonucleotide
  source 1..20: mol_type = other RNA
acaagggcacagacttccaa

SEQ ID NO: 2089 - DNA, 20 bp, synthetic construct
  misc_feature 1..20: note = Description of Artificial Sequence: Synthetic oligonucleotide
  source 1..20: mol_type = other DNA
caagggcacagacttccaaa

SEQ ID NO: 2090 - RNA, 20 nt, synthetic construct
  misc_feature 1..20: note = Description of Artificial Sequence: Synthetic oligonucleotide
  source 1..20: mol_type = other RNA
gcacaagggcacagacttcc

SEQ ID NO: 2091 - RNA, 20 nt, synthetic construct
  misc_feature 1..20: note = Description of Artificial Sequence: Synthetic oligonucleotide
  source 1..20: mol_type = other RNA
cacaagggcacagacttcca

SEQ ID NO: 2092 - RNA, 20 nt, synthetic construct
  misc_feature 1..20: note = Description of Artificial Sequence: Synthetic oligonucleotide
  source 1..20: mol_type = other RNA
acaagggcacagacttccaa

SEQ ID NO: 2093 - RNA, 20 nt, synthetic construct
  misc_feature 1..20: note = Description of Artificial Sequence: Synthetic oligonucleotide
  source 1..20: mol_type = other RNA
caagggcacagacttccaaa

SEQ ID NO: 2094 - RNA, 20 nt, synthetic construct
  misc_feature 1..20: note = Description of Artificial Sequence: Synthetic oligonucleotide
  source 1..20: mol_type = other RNA
gcacaagggcacagacttcc

SEQ ID NO: 2095 - RNA, 20 nt, synthetic construct
  misc_feature 1..20: note = Description of Artificial Sequence: Synthetic oligonucleotide
  source 1..20: mol_type = other RNA
cacaagggcacagacttcca

SEQ ID NO: 2096 - RNA, 20 nt, synthetic construct
  misc_feature 1..20: note = Description of Artificial Sequence: Synthetic oligonucleotide
  source 1..20: mol_type = other RNA
acaagggcacagacttccaa

SEQ ID NO: 2097 - RNA, 20 nt, synthetic construct
  misc_feature 1..20: note = Description of Artificial Sequence: Synthetic oligonucleotide
  source 1..20: mol_type = other RNA
caagggcacagacttccaaa

SEQ ID NO: 2098 - RNA, 20 nt, synthetic construct
  misc_feature 1..20: note = Description of Artificial Sequence: Synthetic oligonucleotide
  source 1..20: mol_type = other RNA
gggcacaagggcacagactt

SEQ ID NO: 2099 - RNA, 20 nt, synthetic construct
  misc_feature 1..20: note = Description of Artificial Sequence: Synthetic oligonucleotide
  source 1..20: mol_type = other RNA
ggcacaagggcacagacttc

SEQ ID NO: 2100 - RNA, 20 nt, synthetic construct
  misc_feature 1..20: note = Description of Artificial Sequence: Synthetic oligonucleotide
  source 1..20: mol_type = other RNA
gcacaagggcacagacttcc

SEQ ID NO: 2101 - RNA, 20 nt, synthetic construct
  misc_feature 1..20: note = Description of Artificial Sequence: Synthetic oligonucleotide
  source 1..20: mol_type = other RNA
cacaagggcacagacttcca

SEQ ID NO: 2102 - RNA, 20 nt, synthetic construct
  modified_base 15: mod_base = OTHER; note = thymine
  misc_feature 1..20: note = Description of Combined DNA/RNA Molecule: Synthetic oligonucleotide
  source 1..20: mol_type = other RNA
acaagggcacagacttccaa

SEQ ID NO: 2103 - DNA, 20 bp, synthetic construct
  misc_feature 1..20: note = Description of Artificial Sequence: Synthetic oligonucleotide
  source 1..20: mol_type = other DNA
caagggcacagacttccaaa

SEQ ID NO: 2104 - DNA, 20 bp, synthetic construct
  misc_feature 1..20: note = Description of Artificial Sequence: Synthetic oligonucleotide
  source 1..20: mol_type = other DNA
gggcacaagggcacagactt

SEQ ID NO: 2105 - DNA, 20 bp, synthetic construct
  misc_feature 1..20: note = Description of Artificial Sequence: Synthetic oligonucleotide
  source 1..20: mol_type = other DNA
ggcacaagggcacagacttc

SEQ ID NO: 2106 - DNA, 20 bp, synthetic construct
  misc_feature 1..20: note = Description of Artificial Sequence: Synthetic oligonucleotide
  source 1..20: mol_type = other DNA
gcacaagggcacagacttcc

SEQ ID NO: 2107 - DNA, 20 bp, synthetic construct
  misc_feature 1..20: note = Description of Artificial Sequence: Synthetic oligonucleotide
  source 1..20: mol_type = other DNA
cacaagggcacagacttcca

SEQ ID NO: 2108 - DNA, 20 bp, synthetic construct
  misc_feature 1..20: note = Description of Artificial Sequence: Synthetic oligonucleotide
  source 1..20: mol_type = other DNA
acaagggcacagacttccaa

SEQ ID NO: 2109 - DNA, 20 bp, synthetic construct
  misc_feature 1..20: note = Description of Artificial Sequence: Synthetic oligonucleotide
  source 1..20: mol_type = other DNA
caagggcacagacttccaaa

SEQ ID NO: 2110 - RNA, 25 nt, synthetic construct
  misc_feature 1..25: note = Description of Artificial Sequence: Synthetic oligonucleotide
  source 1..25: mol_type = other RNA
tttggaagtctgcgcccttgtgccc

SEQ ID NO: 2111 - RNA, 25 nt, synthetic construct
  misc_feature 1..25: note = Description of Artificial Sequence: Synthetic oligonucleotide
  source 1..25: mol_type = other RNA
tttggaagtctgtgcccttgtgccc

SEQ ID NO: 2112 - DNA, 20 bp, synthetic construct
  misc_feature 1..20: note = Description of Artificial Sequence: Synthetic oligonucleotide
  source 1..20: mol_type = other DNA
gagcagctgcaacctggcaa

SEQ ID NO: 2113 - DNA, 20 bp, synthetic construct
  misc_feature 1..20: note = Description of Artificial Sequence: Synthetic oligonucleotide
  source 1..20: mol_type = other DNA
gggccaacagccagcctgca

SEQ ID NO: 2114 - RNA, 25 nt, synthetic construct
  misc_feature 1..25: note = Description of Artificial Sequence: Synthetic oligonucleotide
  source 1..25: mol_type = other RNA
ggttgttgccaggttacagctgctc

SEQ ID NO: 2115 - RNA, 25 nt, synthetic construct
  misc_feature 1..25: note = Description of Artificial Sequence: Synthetic oligonucleotide
  source 1..25: mol_type = other RNA
ggttgttgccaggttgcagctgctc

SEQ ID NO: 2116 - DNA, 20 bp, synthetic construct
  misc_feature 1..20: note = Description of Artificial Sequence: Synthetic oligonucleotide
  source 1..20: mol_type = other DNA
gagcagctgcaacctggcaa

SEQ ID NO: 2117 - DNA, 20 bp, synthetic construct
  misc_feature 1..20: note = Description of Artificial Sequence: Synthetic oligonucleotide
  source 1..20: mol_type = other DNA
agcagctgcaacctggcaac

SEQ ID NO: 2118 - DNA, 20 bp, synthetic construct
  misc_feature 1..20: note = Description of Artificial Sequence: Synthetic oligonucleotide
  source 1..20: mol_type = other DNA
gcagctgcaacctggcaaca

SEQ ID NO: 2119 - DNA, 20 bp, synthetic construct
  misc_feature 1..20: note = Description of Artificial Sequence: Synthetic oligonucleotide
  source 1..20: mol_type = other DNA
cagctgcaacctggcaacaa

SEQ ID NO: 2120 - DNA, 20 bp, synthetic construct
  misc_feature 1..20: note = Description of Artificial Sequence: Synthetic oligonucleotide
  source 1..20: mol_type = other DNA
agctgcaacctggcaacaac

SEQ ID NO: 2121 - DNA, 20 bp, synthetic construct
  misc_feature 1..20: note = Description of Artificial Sequence: Synthetic oligonucleotide
  source 1..20: mol_type = other DNA
gctgcaacctggcaacaacc

SEQ ID NO: 2122 - RNA, 25 nt, synthetic construct
  misc_feature 1..25: note = Description of Artificial Sequence: Synthetic oligonucleotide
  source 1..25: mol_type = other RNA
cctcctgcaggctgggtgttggccc

SEQ ID NO: 2123 - RNA, 25 nt, synthetic construct
  misc_feature 1..25: note = Description of Artificial Sequence: Synthetic oligonucleotide
  source 1..25: mol_type = other RNA
cctcctgcaggctggctgttggccc

SEQ ID NO: 2124 - DNA, 20 bp, synthetic construct
  misc_feature 1..20: note = Description of Artificial Sequence: Synthetic oligonucleotide
  source 1..20: mol_type = other DNA
gggccaacagccagcctgca

SEQ ID NO: 2125 - DNA, 20 bp, synthetic construct
  misc_feature 1..20: note = Description of Artificial Sequence: Synthetic oligonucleotide
  source 1..20: mol_type = other DNA
ggccaacagccagcctgcag

SEQ ID NO: 2126 - DNA, 20 bp, synthetic construct
  misc_feature 1..20: note = Description of Artificial Sequence: Synthetic oligonucleotide
  source 1..20: mol_type = other DNA
gccaacagccagcctgcagg

SEQ ID NO: 2127 - DNA, 20 bp, synthetic construct
  misc_feature 1..20: note = Description of Artificial Sequence: Synthetic oligonucleotide
  source 1..20: mol_type = other DNA
ccaacagccagcctgcagga

SEQ ID NO: 2128 - DNA, 20 bp, synthetic construct
  misc_feature 1..20: note = Description of Artificial Sequence: Synthetic oligonucleotide
  source 1..20: mol_type = other DNA
caacagccagcctgcaggag

SEQ ID NO: 2129 - DNA, 20 bp, synthetic construct
  misc_feature 1..20: note = Description of Artificial Sequence: Synthetic oligonucleotide
  source 1..20: mol_type = other DNA
aacagccagcctgcaggagg

SEQ ID NO: 2130 - RNA, 21 nt, synthetic construct
  modified_base 20..21: mod_base = OTHER; note = thymine
  misc_feature 1..21: note = Description of Combined DNA/RNA Molecule: Synthetic oligonucleotide
  source 1..21: mol_type = other RNA
ggcctttcactactcctactt

SEQ ID NO: 2131 - RNA, 21 nt, synthetic construct
  modified_base 20..21: mod_base = OTHER; note = thymine
  misc_feature 1..21: note = Description of Combined DNA/RNA Molecule: Synthetic oligonucleotide
  source 1..21: mol_type = other RNA
gtaggagtagtgaaaggcctt

SEQ ID NO: 2132 - DNA, 20 bp, synthetic construct
  misc_feature 1..20: note = Description of Artificial Sequence: Synthetic oligonucleotide
  source 1..20: mol_type = other DNA
gtaggagtagtgaaaggcca

SEQ ID NO: 2133 - DNA, 20 bp, synthetic construct
  misc_feature 1..20: note = Description of Artificial Sequence: Synthetic oligonucleotide
  source 1..20: mol_type = other DNA
gcagggcacaagggcacaga

SEQ ID NO: 2134 - DNA, 20 bp, synthetic construct
  misc_feature 1..20: note = Description of Artificial Sequence: Synthetic oligonucleotide
  source 1..20: mol_type = other DNA
cagggcacaagggcacagac

SEQ ID NO: 2135 - DNA, 20 bp, synthetic construct
  misc_feature 1..20: note = Description of Artificial Sequence: Synthetic oligonucleotide
  source 1..20: mol_type = other DNA
agggcacaagggcacagact

SEQ ID NO: 2136 - DNA, 20 bp, synthetic construct
  misc_feature 1..20: note = Description of Artificial Sequence: Synthetic oligonucleotide
  source 1..20: mol_type = other DNA
aagggcacagacttccaaag

SEQ ID NO: 2137 - DNA, 20 bp, synthetic construct
  misc_feature 1..20: note = Description of Artificial Sequence: Synthetic oligonucleotide
  source 1..20: mol_type = other DNA
agggcacagacttccaaagg

SEQ ID NO: 2138 - DNA, 20 bp, synthetic construct
  misc_feature 1..20: note = Description of Artificial Sequence: Synthetic oligonucleotide
  source 1..20: mol_type = other DNA
gggcacagacttccaaaggc

SEQ ID NO: 2139 - DNA, 20 bp, synthetic construct
  misc_feature 1..20: note = Description of Artificial Sequence: Synthetic oligonucleotide
  source 1..20: mol_type = other DNA
gagcagctgcaacctggcaa

SEQ ID NO: 2140 - DNA, 20 bp, synthetic construct
  misc_feature 1..20: note = Description of Artificial Sequence: Synthetic oligonucleotide
  source 1..20: mol_type = other DNA
agcagctgcaacctggcaac

SEQ ID NO: 2141 - DNA, 20 bp, synthetic construct
  misc_feature 1..20: note = Description of Artificial Sequence: Synthetic oligonucleotide
  source 1..20: mol_type = other DNA
gcagctgcaacctggcaaca

SEQ ID NO: 2142 - DNA, 20 bp, synthetic construct
  misc_feature 1..20: note = Description of Artificial Sequence: Synthetic oligonucleotide
  source 1..20: mol_type = other DNA
cagctgcaacctggcaacaa

SEQ ID NO: 2143 - DNA, 20 bp, synthetic construct
  misc_feature 1..20: note = Description of Artificial Sequence: Synthetic oligonucleotide
  source 1..20: mol_type = other DNA
agctgcaacctggcaacaac

SEQ ID NO: 2144 - DNA, 20 bp, synthetic construct
  misc_feature 1..20: note = Description of Artificial Sequence: Synthetic oligonucleotide
  source 1..20: mol_type = other DNA
gctgcaacctggcaacaacc

SEQ ID NO: 2145 - DNA, 20 bp, synthetic construct
  misc_feature 1..20: note = Description of Artificial Sequence: Synthetic oligonucleotide
  source 1..20: mol_type = other DNA
gagcagctgcaacctggcaa

SEQ ID NO: 2146 - DNA, 20 bp, synthetic construct
  misc_feature 1..20: note = Description of Artificial Sequence: Synthetic oligonucleotide
  source 1..20: mol_type = other DNA
agcagctgcaacctggcaac

SEQ ID NO: 2147 - DNA, 20 bp, synthetic construct
  misc_feature 1..20: note = Description of Artificial Sequence: Synthetic oligonucleotide
  source 1..20: mol_type = other DNA
gcagctgcaacctggcaaca

SEQ ID NO: 2148 - RNA, 20 nt, synthetic construct
  modified_base 12: mod_base = OTHER; note = thymine
  misc_feature 1..20: note = Description of Combined DNA/RNA Molecule: Synthetic oligonucleotide
  source 1..20: mol_type = other RNA
cagctgcaacctggcaacaa

SEQ ID NO: 2149 - RNA, 20 nt, synthetic construct
  modified_base 11: mod_base = OTHER; note = thymine
  misc_feature 1..20: note = Description of Combined DNA/RNA Molecule: Synthetic oligonucleotide
  source 1..20: mol_type = other RNA
agctgcaacctggcaacaac

SEQ ID NO: 2150 - RNA, 20 nt, synthetic construct
  modified_base 10: mod_base = OTHER; note = thymine
  misc_feature 1..20: note = Description of Combined DNA/RNA Molecule: Synthetic oligonucleotide
  source 1..20: mol_type = other RNA
gctgcaacctggcaacaacc

SEQ ID NO: 2151 - DNA, 20 bp, synthetic construct
  misc_feature 1..20: note = Description of Artificial Sequence: Synthetic oligonucleotide
  source 1..20: mol_type = other DNA
gagcagctgcaacctggcaa

SEQ ID NO: 2152 - DNA, 20 bp, synthetic construct
  misc_feature 1..20: note = Description of Artificial Sequence: Synthetic oligonucleotide
  source 1..20: mol_type = other DNA
agcagctgcaacctggcaac

SEQ ID NO: 2153 - DNA, 20 bp, synthetic construct
  misc_feature 1..20: note = Description of Artificial Sequence: Synthetic oligonucleotide
  source 1..20: mol_type = other DNA
gcagctgcaacctggcaaca

SEQ ID NO: 2154 - RNA, 20 nt, synthetic construct
  modified_base 12: mod_base = OTHER; note = thymine
  misc_feature 1..20: note = Description of Combined DNA/RNA Molecule: Synthetic oligonucleotide
  source 1..20: mol_type = other RNA
cagctgcaacctggcaacaa

SEQ ID NO: 2155 - RNA, 20 nt, synthetic construct
  modified_base 11: mod_base = OTHER; note = thymine
  misc_feature 1..20: note = Description of Combined DNA/RNA Molecule: Synthetic oligonucleotide
  source 1..20: mol_type = other RNA
agctgcaacctggcaacaac

SEQ ID NO: 2156 - RNA, 20 nt, synthetic construct
  modified_base 10: mod_base = OTHER; note = thymine
  misc_feature 1..20: note = Description of Combined DNA/RNA Molecule: Synthetic oligonucleotide
  source 1..20: mol_type = other RNA
gctgcaacctggcaacaacc

SEQ ID NO: 2157 - RNA, 20 nt, synthetic construct
  modified_base 8: mod_base = OTHER; note = thymine
  misc_feature 1..20: note = Description of Combined DNA/RNA Molecule: Synthetic oligonucleotide
  source 1..20: mol_type = other RNA
gagcagctgcaacctggcaa

SEQ ID NO: 2158 - RNA, 20 nt, synthetic construct
  modified_base 8: mod_base = OTHER; note = thymine
  misc_feature 1..20: note = Description of Combined DNA/RNA Molecule: Synthetic oligonucleotide
  source 1..20: mol_type = other RNA
gagcagctgcaacctggcaa

SEQ ID NO: 2159 - DNA, 20 bp, synthetic construct
  misc_feature 1..20: note = Description of Artificial Sequence: Synthetic oligonucleotide
  source 1..20: mol_type = other DNA
agcagctgcaacctggcaac

SEQ ID NO: 2160 - DNA, 20 bp, synthetic construct
  misc_feature 1..20: note = Description of Artificial Sequence: Synthetic oligonucleotide
  source 1..20: mol_type = other DNA
agcagctgcaacctggcaac

SEQ ID NO: 2161 - RNA, 20 nt, synthetic construct
  modified_base 6: mod_base = OTHER; note = thymine
  misc_feature 1..20: note = Description of Combined DNA/RNA Molecule: Synthetic oligonucleotide
  source 1..20: mol_type = other RNA
gcagctgcaacctggcaaca

SEQ ID NO: 2162 - RNA, 20 nt, synthetic construct
  modified_base 6: mod_base = OTHER; note = thymine
  misc_feature 1..20: note = Description of Combined DNA/RNA Molecule: Synthetic oligonucleotide
  source 1..20: mol_type = other RNA
gcagctgcaacctggcaaca

SEQ ID NO: 2163 - DNA, 20 bp, synthetic construct
  misc_feature 1..20: note = Description of Artificial Sequence: Synthetic oligonucleotide
  source 1..20: mol_type = other DNA
gagcagctgcaacctggcaa

SEQ ID NO: 2164 - DNA, 20 bp, synthetic construct
  misc_feature 1..20: note = Description of Artificial Sequence: Synthetic oligonucleotide
  source 1..20: mol_type = other DNA
agcagctgcaacctggcaac

SEQ ID NO: 2165 - DNA, 20 bp, synthetic construct
  misc_feature 1..20: note = Description of Artificial Sequence: Synthetic oligonucleotide
  source 1..20: mol_type = other DNA
gcagctgcaacctggcaaca

SEQ ID NO: 2166 - RNA, 20 nt, synthetic construct
  modified_base 12: mod_base = OTHER; note = thymine
  misc_feature 1..20: note = Description of Combined DNA/RNA Molecule: Synthetic oligonucleotide
  source 1..20: mol_type = other RNA
cagctgcaacctggcaacaa

SEQ ID NO: 2167 - RNA, 20 nt, synthetic construct
  modified_base 11: mod_base = OTHER; note = thymine
  misc_feature 1..20: note = Description of Combined DNA/RNA Molecule: Synthetic oligonucleotide
  source 1..20: mol_type = other RNA
agctgcaacctggcaacaac

SEQ ID NO: 2168 - RNA, 20 nt, synthetic construct
  modified_base 10: mod_base = OTHER; note = thymine
  misc_feature 1..20: note = Description of Combined DNA/RNA Molecule: Synthetic oligonucleotide
  source 1..20: mol_type = other RNA
gctgcaacctggcaacaacc

SEQ ID NO: 2169 - DNA, 20 bp, synthetic construct
  misc_feature 1..20: note = Description of Artificial Sequence: Synthetic oligonucleotide
  source 1..20: mol_type = other DNA
gggccaacagccagcctgca

SEQ ID NO: 2170 - DNA, 20 bp, synthetic construct
  misc_feature 1..20: note = Description of Artificial Sequence: Synthetic oligonucleotide
  source 1..20: mol_type = other DNA
ggccaacagccagcctgcag

SEQ ID NO: 2171 - DNA, 20 bp, synthetic construct
  misc_feature 1..20: note = Description of Artificial Sequence: Synthetic oligonucleotide
  source 1..20: mol_type = other DNA
gccaacagccagcctgcagg

SEQ ID NO: 2172 - DNA, 20 bp, synthetic construct
  misc_feature 1..20: note = Description of Artificial Sequence: Synthetic oligonucleotide
  source 1..20: mol_type = other DNA
ccaacagccagcctgcagga

SEQ ID NO: 2173 - DNA, 20 bp, synthetic construct
  misc_feature 1..20: note = Description of Artificial Sequence: Synthetic oligonucleotide
  source 1..20: mol_type = other DNA
caacagccagcctgcaggag

SEQ ID NO: 2174 - DNA, 20 bp, synthetic construct
  misc_feature 1..20: note = Description of Artificial Sequence: Synthetic oligonucleotide
  source 1..20: mol_type = other DNA
aacagccagcctgcaggagg

SEQ ID NO: 2175 - DNA, 20 bp, synthetic construct
  misc_feature 1..20: note = Description of Artificial Sequence: Synthetic oligonucleotide
  source 1..20: mol_type = other DNA
gggccaacagccagcctgca

SEQ ID NO: 2176 - DNA, 20 bp, synthetic construct
  misc_feature 1..20: note = Description of Artificial Sequence: Synthetic oligonucleotide
  source 1..20: mol_type = other DNA
ggccaacagccagcctgcag

SEQ ID NO: 2177 - DNA, 20 bp, synthetic construct
  misc_feature 1..20: note = Description of Artificial Sequence: Synthetic oligonucleotide
  source 1..20: mol_type = other DNA
gccaacagccagcctgcagg

SEQ ID NO: 2178 - DNA, 20 bp, synthetic construct
  misc_feature 1..20: note = Description of Artificial Sequence: Synthetic oligonucleotide
  source 1..20: mol_type = other DNA
ccaacagccagcctgcagga

SEQ ID NO: 2179 - DNA, 20 bp, synthetic construct
  misc_feature 1..20: note = Description of Artificial Sequence: Synthetic oligonucleotide
  source 1..20: mol_type = other DNA
caacagccagcctgcaggag

SEQ ID NO: 2180 - DNA, 20 bp, synthetic construct
  misc_feature 1..20: note = Description of Artificial Sequence: Synthetic oligonucleotide
  source 1..20: mol_type = other DNA
aacagccagcctgcaggagg

SEQ ID NO: 2181 - RNA, 20 nt, synthetic construct
  misc_feature 1..20: note = Description of Artificial Sequence: Synthetic oligonucleotide
  source 1..20: mol_type = other RNA
gggccaacagccagcctgca

SEQ ID NO: 2182 - RNA, 20 nt, synthetic construct
  misc_feature 1..20: note = Description of Artificial Sequence: Synthetic oligonucleotide
  source 1..20: mol_type = other RNA
ggccaacagccagcctgcag

SEQ ID NO: 2183 - DNA, 20 bp, synthetic construct
  misc_feature 1..20: note = Description of Artificial Sequence: Synthetic oligonucleotide
  source 1..20: mol_type = other DNA
gccaacagccagcctgcagg

SEQ ID NO: 2184 - DNA, 20 bp, synthetic construct
  misc_feature 1..20: note = Description of Artificial Sequence: Synthetic oligonucleotide
  source 1..20: mol_type = other DNA
ccaacagccagcctgcagga

SEQ ID NO: 2185 - DNA, 20 bp, synthetic construct
  misc_feature 1..20: note = Description of Artificial Sequence: Synthetic oligonucleotide
  source 1..20: mol_type = other DNA
caacagccagcctgcaggag

SEQ ID NO: 2186 - DNA, 20 bp, synthetic construct
  misc_feature 1..20: note = Description of Artificial Sequence: Synthetic oligonucleotide
  source 1..20: mol_type = other DNA
aacagccagcctgcaggagg

SEQ ID NO: 2187 - RNA, 20 nt, synthetic construct
  misc_feature 1..20: note = Description of Artificial Sequence: Synthetic oligonucleotide
  source 1..20: mol_type = other RNA
gggccaacagccagcctgca

SEQ ID NO: 2188 - RNA, 20 nt, synthetic construct
  misc_feature 1..20: note = Description of Artificial Sequence: Synthetic oligonucleotide
  source 1..20: mol_type = other RNA
gggccaacagccagcctgca

SEQ ID NO: 2189 - RNA, 20 nt, synthetic construct
  misc_feature 1..20: note = Description of Artificial Sequence: Synthetic oligonucleotide
  source 1..20: mol_type = other RNA
ggccaacagccagcctgcag

SEQ ID NO: 2190 - RNA, 20 nt, synthetic construct
  misc_feature 1..20: note = Description of Artificial Sequence: Synthetic oligonucleotide
  source 1..20: mol_type = other RNA
ggccaacagccagcctgcag

SEQ ID NO: 2191 - RNA, 20 nt, synthetic construct
  misc_feature 1..20: note = Description of Artificial Sequence: Synthetic oligonucleotide
  source 1..20: mol_type = other RNA
gccaacagccagcctgcagg

SEQ ID NO: 2192 - RNA, 20 nt, synthetic construct
  misc_feature 1..20: note = Description of Artificial Sequence: Synthetic oligonucleotide
  source 1..20: mol_type = other RNA
gccaacagccagcctgcagg

SEQ ID NO: 2193 - RNA, 20 nt, synthetic construct
  misc_feature 1..20: note = Description of Artificial Sequence: Synthetic oligonucleotide
  source 1..20: mol_type = other RNA
gggccaacagccagcctgca

SEQ ID NO: 2194 - RNA, 20 nt, synthetic construct
  misc_feature 1..20: note = Description of Artificial Sequence: Synthetic oligonucleotide
  source 1..20: mol_type = other RNA
ggccaacagccagcctgcag

SEQ ID NO: 2195 - DNA, 20 bp, synthetic construct
  misc_feature 1..20: note = Description of Artificial Sequence: Synthetic oligonucleotide
  source 1..20: mol_type = other DNA
gccaacagccagcctgcagg

SEQ ID NO: 2196 - DNA, 20 bp, synthetic construct
  misc_feature 1..20: note = Description of Artificial Sequence: Synthetic oligonucleotide
  source 1..20: mol_type = other DNA
ccaacagccagcctgcagga

SEQ ID NO: 2197 - DNA, 20 bp, synthetic construct
  misc_feature 1..20: note = Description of Artificial Sequence: Synthetic oligonucleotide
  source 1..20: mol_type = other DNA
caacagccagcctgcaggag

SEQ ID NO: 2198 - DNA, 20 bp, synthetic construct
  misc_feature 1..20: note = Description of Artificial Sequence: Synthetic oligonucleotide
  source 1..20: mol_type = other DNA
aacagccagcctgcaggagg

SEQ ID NO: 2199 - RNA, 20 nt, synthetic construct
  modified_base 8: mod_base = OTHER; note = thymine
  modified_base 11: mod_base = OTHER; note = thymine
  misc_feature 1..20: note = Description of Combined DNA/RNA Molecule: Synthetic oligonucleotide
  source 1..20: mol_type = other RNA
gtaggagtagtgaaaggcca

SEQ ID NO: 2200 - RNA, 20 nt, synthetic construct
  modified_base 8: mod_base = OTHER; note = thymine
  modified_base 11: mod_base = OTHER; note = thymine
  misc_feature 1..20: note = Description of Combined DNA/RNA Molecule: Synthetic oligonucleotide
  source 1..20: mol_type = other RNA
gtaggagtagtgaaaggcca

SEQ ID NO: 2201 - RNA, 20 nt, synthetic construct
  modified_base 8: mod_base = OTHER; note = thymine
  modified_base 11: mod_base = OTHER; note = thymine
  misc_feature 1..20: note = Description of Combined DNA/RNA Molecule: Synthetic oligonucleotide
  source 1..20: mol_type = other RNA
gtaggagtagtgaaaggcca

SEQ ID NO: 2202 - RNA, 20 nt, synthetic construct
  modified_base 8: mod_base = OTHER; note = thymine
  modified_base 10: mod_base = OTHER; note = thymine
  modified_base 13: mod_base = OTHER; note = thymine
  modified_base 15: mod_base = OTHER; note = thymine
  misc_feature 1..20: note = Description of Combined DNA/RNA Molecule: Synthetic oligonucleotide
  source 1..20: mol_type = other RNA
ctcttactgtgctgtggaca

SEQ ID NO: 2203 - RNA, 20 nt, synthetic construct
  modified_base 8: mod_base = OTHER; note = thymine
  modified_base 10: mod_base = OTHER; note = thymine
  modified_base 13: mod_base = OTHER; note = thymine
  modified_base 15: mod_base = OTHER; note = thymine
  misc_feature 1..20: note = Description of Combined DNA/RNA Molecule: Synthetic oligonucleotide
  source 1..20: mol_type = other RNA
ctcttactgtgctgtggaca

SEQ ID NO: 2204 - RNA, 20 nt, synthetic construct
  modified_base 8: mod_base = OTHER; note = thymine
  modified_base 10: mod_base = OTHER; note = thymine
  modified_base 13: mod_base = OTHER; note = thymine
  modified_base 15: mod_base = OTHER; note = thymine
  misc_feature 1..20: note = Description of Combined DNA/RNA Molecule: Synthetic oligonucleotide
  source 1..20: mol_type = other RNA
ctcttactgtgctgtggaca

SEQ ID NO: 2205 - DNA, 20 bp, synthetic construct
  misc_feature 1..20: note = Description of Artificial Sequence: Synthetic oligonucleotide
  source 1..20: mol_type = other DNA
gggcacaagggcacagactt

SEQ ID NO: 2206 - DNA, 20 bp, synthetic construct
  misc_feature 1..20: note = Description of Artificial Sequence: Synthetic oligonucleotide
  source 1..20: mol_type = other DNA
ggcacaagggcacagacttc

SEQ ID NO: 2207 - DNA, 20 bp, synthetic construct
  misc_feature 1..20: note = Description of Artificial Sequence: Synthetic oligonucleotide
  source 1..20: mol_type = other DNA
gcacaagggcacagacttcc

SEQ ID NO: 2208 - DNA, 20 bp, synthetic construct
  misc_feature 1..20: note = Description of Artificial Sequence: Synthetic oligonucleotide
  source 1..20: mol_type = other DNA
gggcacaagggcacagactt

SEQ ID NO: 2209 - DNA, 20 bp, synthetic construct
  misc_feature 1..20: note = Description of Artificial Sequence: Synthetic oligonucleotide
  source 1..20: mol_type = other DNA
ggcacaagggcacagacttc

SEQ ID NO: 2210 - DNA, 20 bp, synthetic construct
  misc_feature 1..20: note = Description of Artificial Sequence: Synthetic oligonucleotide
  source 1..20: mol_type = other DNA
gcacaagggcacagacttcc

SEQ ID NO: 2211 - RNA, 35 nt, synthetic construct; identical to SEQ ID NO: 1859
  misc_feature 1..35: note = Description of Artificial Sequence: Synthetic oligonucleotide
  source 1..35: mol_type = other RNA

SEQ ID NO: 2212 - RNA, 35 nt, synthetic construct; identical to SEQ ID NO: 1860
  misc_feature 1..35: note = Description of Artificial Sequence: Synthetic oligonucleotide
  source 1..35: mol_type = other RNA

SEQ ID NO: 2213 - RNA, 21 nt, synthetic construct
  misc_feature 1..21: note = Description of Artificial Sequence: Synthetic oligonucleotide
  source 1..21: mol_type = other RNA
cacacgggcacagacttccaa

SEQ ID NO: 2214 - RNA, 21 nt, synthetic construct
  misc_feature 1..21: note = Description of Artificial Sequence: Synthetic oligonucleotide
  source 1..21: mol_type = other RNA
ggaagtctgtgcccgtgtgcc

SEQ ID NO: 2215 - RNA, 20 nt, synthetic construct
  modified_base 10..11: mod_base = OTHER; note = thymine
  modified_base 13: mod_base = OTHER; note = thymine
  modified_base 16: mod_base = OTHER; note = thymine
  misc_feature 1..20: note = Description of Combined DNA/RNA Molecule: Synthetic oligonucleotide
  source 1..20: mol_type = other RNA
attaataaattgtcatcacc

SEQ ID NO: 2216 - RNA, 20 nt, synthetic construct
  modified_base 10..11: mod_base = OTHER; note = thymine
  modified_base 13: mod_base = OTHER; note = thymine
  modified_base 16: mod_base = OTHER; note = thymine
  misc_feature 1..20: note = Description of Combined DNA/RNA Molecule: Synthetic oligonucleotide
  source 1..20: mol_type = other RNA
attaataaattgtcatcacc

SEQ ID NO: 2217 - RNA, 20 nt, synthetic construct
  modified_base 10..11: mod_base = OTHER; note = thymine
  modified_base 13: mod_base = OTHER; note = thymine
  modified_base 16: mod_base = OTHER; note = thymine
  misc_feature 1..20: note = Description of Combined DNA/RNA Molecule: Synthetic oligonucleotide
  source 1..20: mol_type = other RNA
attaataaattgtcatcacc

SEQ ID NO: 2218 - RNA, 20 nt, synthetic construct
  modified_base 10..11: mod_base = OTHER; note = thymine
  modified_base 13: mod_base = OTHER; note = thymine
  modified_base 16: mod_base = OTHER; note = thymine
  misc_feature 1..20: note = Description of Combined DNA/RNA Molecule: Synthetic oligonucleotide
  source 1..20: mol_type = other RNA
attaataaattgtcatcacc

SEQ ID NO: 2219 - RNA, 20 nt, synthetic construct
  modified_base 10..11: mod_base = OTHER; note = thymine
  modified_base 13: mod_base = OTHER; note = thymine
  modified_base 16: mod_base = OTHER; note = thymine
  misc_feature 1..20: note = Description of Combined DNA/RNA Molecule: Synthetic oligonucleotide
  source 1..20: mol_type = other RNA
attaataaattgtcatcacc

SEQ ID NO: 2220 - RNA, 20 nt, synthetic construct
  modified_base 10..11: mod_base = OTHER; note = thymine
  modified_base 13: mod_base = OTHER; note = thymine
  modified_base 16: mod_base = OTHER; note = thymine
  misc_feature 1..20: note = Description of Combined DNA/RNA Molecule: Synthetic oligonucleotide
  source 1..20: mol_type = other RNA
attaataaattgtcatcacc

SEQ ID NO: 2221 - RNA, 20 nt, synthetic construct
  modified_base 10..11: mod_base = OTHER; note = thymine
  modified_base 13: mod_base = OTHER; note = thymine
  modified_base 16: mod_base = OTHER; note = thymine
  misc_feature 1..20: note = Description of Combined DNA/RNA Molecule: Synthetic oligonucleotide
  source 1..20: mol_type = other RNA
attaataaattgtcatcacc

SEQ ID NO: 2222 - RNA, 20 nt, synthetic construct
  modified_base 10..11: mod_base = OTHER; note = thymine
  modified_base 13: mod_base = OTHER; note = thymine
  modified_base 16: mod_base = OTHER; note = thymine
  misc_feature 1..20: note = Description of Combined DNA/RNA Molecule: Synthetic oligonucleotide
  source 1..20: mol_type = other RNA
attaataaattgtcatcacc

SEQ ID NO: 2223 - RNA, 20 nt, synthetic construct
  misc_feature 1..20: note = Description of Artificial Sequence: Synthetic oligonucleotide
  source 1..20: mol_type = other RNA
ggcacaagggcacagacttc

SEQ ID NO: 2224 - RNA, 20 nt, synthetic construct
  misc_feature 1..20: note = Description of Artificial Sequence: Synthetic oligonucleotide
  source 1..20: mol_type = other RNA
ggcacaagggcacagacttc

SEQ ID NO: 2225 - RNA, 20 nt, synthetic construct
  misc_feature 1..20: note = Description of Artificial Sequence: Synthetic oligonucleotide
  source 1..20: mol_type = other RNA
ggcacaagggcacagacttc

SEQ ID NO: 2226 - DNA, 20 bp, synthetic construct
  misc_feature 1..20: note = Description of Artificial Sequence: Synthetic oligonucleotide
  source 1..20: mol_type = other DNA
ggcacaagggcacagacttc

SEQ ID NO: 2227 - DNA, 20 bp, synthetic construct
  misc_feature 1..20: note = Description of Artificial Sequence: Synthetic oligonucleotide
  source 1..20: mol_type = other DNA
ggcacaagggcacagacttc

SEQ ID NO: 2228 - DNA, 20 bp, synthetic construct
  misc_feature 1..20: note = Description of Artificial Sequence: Synthetic oligonucleotide
  source 1..20: mol_type = other DNA
ggcacaagggcacagacttc

SEQ ID NO: 2229 - RNA, 20 nt, synthetic construct
  misc_feature 1..20: note = Description of Artificial Sequence: Synthetic oligonucleotide
  source 1..20: mol_type = other RNA
ggcacaagggcacagacttc

SEQ ID NO: 2230 - RNA, 20 nt, synthetic construct
  misc_feature 1..20: note = Description of Artificial Sequence: Synthetic oligonucleotide
  source 1..20: mol_type = other RNA
ggcacaagggcacagacttc

SEQ ID NO: 2231 - DNA, 20 bp, synthetic construct
  misc_feature 1..20: note = Description of Artificial Sequence: Synthetic oligonucleotide
  source 1..20: mol_type = other DNA
gcagggcacaagggcacaga

SEQ ID NO: 2232 - DNA, 20 bp, synthetic construct
  misc_feature 1..20: note = Description of Artificial Sequence: Synthetic oligonucleotide
  source 1..20: mol_type = other DNA
gcagggcacaagggcacaga

SEQ ID NO: 2233 - DNA, 20 bp, synthetic construct
  misc_feature 1..20: note = Description of Artificial Sequence: Synthetic oligonucleotide
  source 1..20: mol_type = other DNA
gcagggcacaagggcacaga

SEQ ID NO: 2234 - DNA, 20 bp, synthetic construct
  misc_feature 1..20: note = Description of Artificial Sequence: Synthetic oligonucleotide
  source 1..20: mol_type = other DNA
gcagggcacaagggcacaga

SEQ ID NO: 2235 - DNA, 20 bp, synthetic construct
  misc_feature 1..20: note = Description of Artificial Sequence: Synthetic oligonucleotide
  source 1..20: mol_type = other DNA
gcagggcacaagggcacaga

SEQ ID NO: 2236 - DNA, 20 bp, synthetic construct
  misc_feature 1..20: note = Description of Artificial Sequence: Synthetic oligonucleotide
  source 1..20: mol_type = other DNA
cagggcacaagggcacagac

SEQ ID NO: 2237 - DNA, 20 bp, synthetic construct
  misc_feature 1..20: note = Description of Artificial Sequence: Synthetic oligonucleotide
  source 1..20: mol_type = other DNA
cagggcacaagggcacagac

SEQ ID NO: 2238 - DNA, 20 bp, synthetic construct
  misc_feature 1..20: note = Description of Artificial Sequence: Synthetic oligonucleotide
  source 1..20: mol_type = other DNA
cagggcacaagggcacagac

SEQ ID NO: 2239 - DNA, 20 bp, synthetic construct
  misc_feature 1..20: note = Description of Artificial Sequence: Synthetic oligonucleotide
  source 1..20: mol_type = other DNA
cagggcacaagggcacagac

SEQ ID NO: 2240 - DNA, 20 bp, synthetic construct
  misc_feature 1..20: note = Description of Artificial Sequence: Synthetic oligonucleotide
  source 1..20: mol_type = other DNA
cagggcacaagggcacagac

SEQ ID NO: 2241 - DNA, 20 bp, synthetic construct
  misc_feature 1..20: note = Description of Artificial Sequence: Synthetic oligonucleotide
  source 1..20: mol_type = other DNA
agggcacaagggcacagact

SEQ ID NO: 2242 - DNA, 20 bp, synthetic construct
  misc_feature 1..20: note = Description of Artificial Sequence: Synthetic oligonucleotide
  source 1..20: mol_type = other DNA
agggcacaagggcacagact

SEQ ID NO: 2243 - DNA, 20 bp, synthetic construct
  misc_feature 1..20: note = Description of Artificial Sequence: Synthetic oligonucleotide
  source 1..20: mol_type = other DNA
agggcacaagggcacagact

SEQ ID NO: 2244 - RNA, 20 nt, synthetic construct
  misc_feature 1..20: note = Description of Artificial Sequence: Synthetic oligonucleotide
  source 1..20: mol_type = other RNA
agggcacaagggcacagact

SEQ ID NO: 2245 - RNA, 20 nt, synthetic construct
  misc_feature 1..20: note = Description of Artificial Sequence: Synthetic oligonucleotide
  source 1..20: mol_type = other RNA
agggcacaagggcacagact

SEQ ID NO: 2246 - DNA, 20 bp, synthetic construct
  misc_feature 1..20: note = Description of Artificial Sequence: Synthetic oligonucleotide
  source 1..20: mol_type = other DNA
aagggcacagacttccaaag

SEQ ID NO: 2247 - DNA, 20 bp, synthetic construct
  misc_feature 1..20: note = Description of Artificial Sequence: Synthetic oligonucleotide
  source 1..20: mol_type = other DNA
aagggcacagacttccaaag

SEQ ID NO: 2248 - DNA, 20 bp, synthetic construct
  misc_feature 1..20: note = Description of Artificial Sequence: Synthetic oligonucleotide
  source 1..20: mol_type = other DNA
aagggcacagacttccaaag

SEQ ID NO: 2249 - DNA, 20 bp, synthetic construct
  misc_feature 1..20: note = Description of Artificial Sequence: Synthetic oligonucleotide
  source 1..20: mol_type = other DNA
aagggcacagacttccaaag

SEQ ID NO: 2250 - DNA, 20 bp, synthetic construct
  misc_feature 1..20: note = Description of Artificial Sequence: Synthetic oligonucleotide
  source 1..20: mol_type = other DNA
aagggcacagacttccaaag

SEQ ID NO: 2251 - DNA, 20 bp, synthetic construct
  misc_feature 1..20: note = Description of Artificial Sequence: Synthetic oligonucleotide
  source 1..20: mol_type = other DNA
aagggcacagacttccaaag

SEQ ID NO: 2252 - DNA, 20 bp, synthetic construct
  misc_feature 1..20: note = Description of Artificial Sequence: Synthetic oligonucleotide
  source 1..20: mol_type = other DNA
aagggcacagacttccaaag

SEQ ID NO: 2253 - DNA, 20 bp, synthetic construct
  misc_feature 1..20: note = Description of Artificial Sequence: Synthetic oligonucleotide
  source 1..20: mol_type = other DNA
agggcacagacttccaaagg

SEQ ID NO: 2254 - DNA, 20 bp, synthetic construct
  misc_feature 1..20: note = Description of Artificial Sequence: Synthetic oligonucleotide
  source 1..20: mol_type = other DNA
agggcacagacttccaaagg

SEQ ID NO: 2255 - DNA, 20 bp, synthetic construct
  misc_feature 1..20: note = Description of Artificial Sequence: Synthetic oligonucleotide
  source 1..20: mol_type = other DNA
agggcacagacttccaaagg

SEQ ID NO: 2256 - DNA, 20 bp, synthetic construct
  misc_feature 1..20: note = Description of Artificial Sequence: Synthetic oligonucleotide
  source 1..20: mol_type = other DNA
agggcacagacttccaaagg

SEQ ID NO: 2257 - DNA, 20 bp, synthetic construct
  misc_feature 1..20: note = Description of Artificial Sequence: Synthetic oligonucleotide
  source 1..20: mol_type = other DNA
agggcacagacttccaaagg

SEQ ID NO: 2258 - DNA, 20 bp, synthetic construct
  misc_feature 1..20: note = Description of Artificial Sequence: Synthetic oligonucleotide
  source 1..20: mol_type = other DNA
agggcacagacttccaaagg

SEQ ID NO: 2259 - DNA, 20 bp, synthetic construct
  misc_feature 1..20: note = Description of Artificial Sequence: Synthetic oligonucleotide
  source 1..20: mol_type = other DNA
agggcacagacttccaaagg

SEQ ID NO: 2260 - DNA, 20 bp, synthetic construct
  misc_feature 1..20: note = Description of Artificial Sequence: Synthetic oligonucleotide
  source 1..20: mol_type = other DNA
gggcacagacttccaaaggc

SEQ ID NO: 2261 - DNA, 20 bp, synthetic construct
  misc_feature 1..20: note = Description of Artificial Sequence: Synthetic oligonucleotide
  source 1..20: mol_type = other DNA
gggcacagacttccaaaggc

SEQ ID NO: 2262 - DNA, 20 bp, synthetic construct
  misc_feature 1..20: note = Description of Artificial Sequence: Synthetic oligonucleotide
  source 1..20: mol_type = other DNA
gggcacagacttccaaaggc

SEQ ID NO: 2263 - DNA, 20 bp, synthetic construct
  misc_feature 1..20: note = Description of Artificial Sequence: Synthetic oligonucleotide
  source 1..20: mol_type = other DNA
gggcacagacttccaaaggc

SEQ ID NO: 2264 - DNA, 20 bp, synthetic construct
  misc_feature 1..20: note = Description of Artificial Sequence: Synthetic oligonucleotide
  source 1..20: mol_type = other DNA
gggcacagacttccaaaggc

SEQ ID NO: 2265 - RNA, 20 nt, synthetic construct
  misc_feature 1..20: note = Description of Artificial Sequence: Synthetic oligonucleotide
  source 1..20: mol_type = other RNA
ggcacaagggcacagacttc

SEQ ID NO: 2266 - RNA, 20 nt, synthetic construct
  misc_feature 1..20: note = Description of Artificial Sequence: Synthetic oligonucleotide
  source 1..20: mol_type = other RNA
ggcacaagggcacagacttc

SEQ ID NO: 2267 - RNA, 20 nt, synthetic construct
  misc_feature 1..20: note = Description of Artificial Sequence: Synthetic oligonucleotide
  source 1..20: mol_type = other RNA
ggcacaagggcacagacttc

SEQ ID NO: 2268 - RNA, 20 nt, synthetic construct
  modified_base 10..11: mod_base = OTHER; note = thymine
  modified_base 13: mod_base = OTHER; note = thymine
  modified_base 16: mod_base = OTHER; note = thymine
  misc_feature 1..20: note = Description of Combined DNA/RNA Molecule: Synthetic oligonucleotide
  source 1..20: mol_type = other RNA
attaataaattgtcatcacc

SEQ ID NO: 2269 - RNA, 20 nt, synthetic construct
  modified_base 10..11: mod_base = OTHER; note = thymine
  modified_base 13: mod_base = OTHER; note = thymine
  modified_base 16: mod_base = OTHER; note = thymine
  misc_feature 1..20: note = Description of Combined DNA/RNA Molecule: Synthetic oligonucleotide
  source 1..20: mol_type = other RNA
attaataaattgtcatcacc

SEQ ID NO: 2270 - RNA, 20 nt, synthetic construct
  misc_feature 1..20: note = Description of Artificial Sequence: Synthetic oligonucleotide
  source 1..20: mol_type = other RNA
ggcacaagggcacagacttc

SEQ ID NO: 2271 - RNA, 20 nt, synthetic construct
  misc_feature 1..20: note = Description of Artificial Sequence: Synthetic oligonucleotide
  source 1..20: mol_type = other RNA
ggcacaagggcacagacttc

SEQ ID NO: 2272 - DNA, 20 bp, synthetic construct
  misc_feature 1..20: note = Description of Artificial Sequence: Synthetic oligonucleotide
  source 1..20: mol_type = other DNA
ggcacaagggcacagacttc

SEQ ID NO: 2273 - DNA, 20 bp, synthetic construct
  misc_feature 1..20: note = Description of Artificial Sequence: Synthetic oligonucleotide
  source 1..20: mol_type = other DNA
ggcacaagggcacagacttc

SEQ ID NO: 2274 - DNA, 20 bp, synthetic construct
  misc_feature 1..20: note = Description of Artificial Sequence: Synthetic oligonucleotide
  source 1..20: mol_type = other DNA
ctcagtaacattgacaccac

SEQ ID NO: 2275 - RNA, 20 nt, synthetic construct
  modified_base 6: mod_base = OTHER; note = thymine
  modified_base 11..12: mod_base = OTHER; note = thymine
  misc_feature 1..20: note = Description of Combined DNA/RNA Molecule: Synthetic oligonucleotide
  source 1..20: mol_type = other RNA
ctcagtaacattgacaccac

SEQ ID NO: 2276 - RNA, 20 nt, synthetic construct
  misc_feature 1..20: note = Description of Artificial Sequence: Synthetic oligonucleotide
  source 1..20: mol_type = other RNA
ggcacaagggcacagacttc

SEQ ID NO: 2277 - RNA, 20 nt, synthetic construct
  modified_base 6: mod_base = OTHER; note = thymine
  modified_base 11..12: mod_base = OTHER; note = thymine
  misc_feature 1..20: note = Description of Combined DNA/RNA Molecule: Synthetic oligonucleotide
  source 1..20: mol_type = other RNA
ctcagtaacattgacaccac

SEQ ID NO: 2278 - RNA, 20 nt, synthetic construct
  modified_base 6: mod_base = OTHER; note = thymine
  modified_base 11..12: mod_base = OTHER; note = thymine
  misc_feature 1..20: note = Description of Combined DNA/RNA Molecule: Synthetic oligonucleotide
  source 1..20: mol_type = other RNA
ctcagtaacattgacaccac

SEQ ID NO: 2279 - RNA, 20 nt, synthetic construct
  misc_feature 1..20: note = Description of Artificial Sequence: Synthetic oligonucleotide
  source 1..20: mol_type = other RNA
gaagtctgtgcccttgtgcc

SEQ ID NO: 2280 - RNA, 20 nt, synthetic construct
  misc_feature 1..20: note = Description of Artificial Sequence: Synthetic oligonucleotide
  source 1..20: mol_type = other RNA
ggcacaagggcacagacttc

SEQ ID NO: 2281 - RNA, 20 nt, synthetic construct
  modified_base 1: mod_base = OTHER; note = thymine
  modified_base 3: mod_base = OTHER; note = thymine
  modified_base 6: mod_base = OTHER; note = thymine
  misc_feature 1..20: note = Description of Combined DNA/RNA Molecule: Synthetic oligonucleotide
  source 1..20: mol_type = other RNA
tgtcatcaccagaaaaagtc

SEQ ID NO: 2282 - RNA, 20 nt, synthetic construct
  modified_base 2: mod_base = OTHER; note = thymine
  modified_base 4: mod_base = OTHER; note = thymine
  modified_base 7: mod_base = OTHER; note = thymine
  misc_feature 1..20: note = Description of Combined DNA/RNA Molecule: Synthetic oligonucleotide
  source 1..20: mol_type = other RNA
ttgtcatcaccagaaaaagt

SEQ ID NO: 2283 - RNA, 20 nt, synthetic construct
  modified_base 1..2: mod_base = OTHER; note = thymine
  modified_base 4: mod_base = OTHER; note = thymine
  modified_base 7: mod_base = OTHER; note = thymine
  misc_feature 1..20: note = Description of Combined DNA/RNA Molecule: Synthetic oligonucleotide
  source 1..20: mol_type = other RNA
ttgtcatcaccagaaaaagt

SEQ ID NO: 2284 - RNA, 20 nt, synthetic construct
  modified_base 3: mod_base = OTHER; note = thymine
  modified_base 5: mod_base = OTHER; note = thymine
  modified_base 8: mod_base = OTHER; note = thymine
  misc_feature 1..20: note = Description of Combined DNA/RNA Molecule: Synthetic oligonucleotide
  source 1..20: mol_type = other RNA
attgtcatcaccagaaaaag

SEQ ID NO: 2285 - DNA, 20 bp, synthetic construct
  misc_feature 1..20: note = Description of Artificial Sequence: Synthetic oligonucleotide
  source 1..20: mol_type = other DNA
attgtcatcaccagaaaaag

SEQ ID NO: 2286 - RNA, 20 nt, synthetic construct
  modified_base 4: mod_base = OTHER; note = thymine
  modified_base 6: mod_base = OTHER; note = thymine
  modified_base 9: mod_base = OTHER; note = thymine
  misc_feature 1..20: note = Description of Combined DNA/RNA Molecule: Synthetic oligonucleotide
  source 1..20: mol_type = other RNA
aattgtcatcaccagaaaaa

SEQ ID NO: 2287 - DNA, 20 bp, synthetic construct
  misc_feature 1..20: note = Description of Artificial Sequence: Synthetic oligonucleotide
  source 1..20: mol_type = other DNA
aattgtcatcaccagaaaaa

SEQ ID NO: 2288 - DNA, 20 bp, synthetic construct
  misc_feature 1..20: note = Description of Artificial Sequence: Synthetic oligonucleotide
  source 1..20: mol_type = other DNA
aaattgtcatcaccagaaaa

SEQ ID NO: 2289 - RNA, 20 nt, synthetic construct
  modified_base 5: mod_base = OTHER; note = thymine
  modified_base 7: mod_base = OTHER; note = thymine
  modified_base 10: mod_base = OTHER; note = thymine
  misc_feature 1..20: note = Description of Combined DNA/RNA Molecule: Synthetic oligonucleotide
  source 1..20: mol_type = other RNA
aaattgtcatcaccagaaaa

SEQ ID NO: 2290 - RNA, 20 nt, synthetic construct
  modified_base 6: mod_base = OTHER; note = thymine
  modified_base 8: mod_base = OTHER; note = thymine
  modified_base 11: mod_base = OTHER; note = thymine
  misc_feature 1..20: note = Description of Combined DNA/RNA Molecule: Synthetic oligonucleotide
  source 1..20: mol_type = other RNA
taaattgtcatcaccagaaa

SEQ ID NO: 2291 - RNA, 20 nt, synthetic construct
  modified_base 6: mod_base = OTHER; note = thymine
  modified_base 8: mod_base = OTHER; note = thymine
  modified_base 11: mod_base = OTHER; note = thymine
  misc_feature 1..20: note = Description of Combined DNA/RNA Molecule: Synthetic oligonucleotide
  source 1..20: mol_type = other RNA
taaattgtcatcaccagaaa

SEQ ID NO: 2292 - RNA, 20 nt, synthetic construct
  modified_base 6..7: mod_base = OTHER; note = thymine
  modified_base 9: mod_base = OTHER; note = thymine
  modified_base 12: mod_base = OTHER; note = thymine
  misc_feature 1..20: note = Description of Combined DNA/RNA Molecule: Synthetic oligonucleotide
  source 1..20: mol_type = other RNA
ataaattgtcatcaccagaa

SEQ ID NO: 2293 - RNA, 20 nt, synthetic construct
  modified_base 6..7: mod_base = OTHER; note = thymine
  modified_base 9: mod_base = OTHER; note = thymine
  modified_base 12: mod_base = OTHER; note = thymine
  misc_feature 1..20: note = Description of Combined DNA/RNA Molecule: Synthetic oligonucleotide
  source 1..20: mol_type = other RNA
ataaattgtcatcaccagaa

SEQ ID NO: 2294 - RNA, 20 nt, synthetic construct
  modified_base 7..8: mod_base = OTHER; note = thymine
  modified_base 10: mod_base = OTHER; note = thymine
  modified_base 13: mod_base = OTHER; note = thymine
  misc_feature 1..20: note = Description of Combined DNA/RNA Molecule: Synthetic oligonucleotide
  source 1..20: mol_type = other RNA
aataaattgtcatcaccaga

SEQ ID NO: 2295 - RNA, 20 nt, synthetic construct
  modified_base 7..8: mod_base = OTHER; note = thymine
  modified_base 10: mod_base = OTHER; note = thymine
  modified_base 13: mod_base = OTHER; note = thymine
  misc_feature 1..20: note = Description of Combined DNA/RNA Molecule: Synthetic oligonucleotide
  source 1..20: mol_type = other RNA
aataaattgtcatcaccaga

SEQ ID NO: 2296 - RNA, 20 nt, synthetic construct
  modified_base 7..8: mod_base = OTHER; note = thymine
  modified_base 10: mod_base = OTHER; note = thymine
  modified_base 13: mod_base = OTHER; note = thymine
  misc_feature 1..20: note = Description of Combined DNA/RNA Molecule: Synthetic oligonucleotide
  source 1..20: mol_type = other RNA
aataaattgtcatcaccaga

SEQ ID NO: 2297 - RNA, 20 nt, synthetic construct
  modified_base 8..9: mod_base = OTHER; note = thymine
  modified_base 11: mod_base = OTHER; note = thymine
  modified_base 14: mod_base = OTHER; note = thymine
  misc_feature 1..20: note = Description of Combined DNA/RNA Molecule: Synthetic oligonucleotide
  source 1..20: mol_type = other RNA
taataaattgtcatcaccag

SEQ ID NO: 2298 - RNA, 20 nt, synthetic construct
  modified_base 8..9: mod_base = OTHER; note = thymine
  modified_base 11: mod_base = OTHER; note = thymine
  modified_base 14: mod_base = OTHER; note = thymine
  misc_feature 1..20: note = Description of Combined DNA/RNA Molecule: Synthetic oligonucleotide
  source 1..20: mol_type = other RNA
taataaattgtcatcaccag

SEQ ID NO: 2299 - RNA, 20 nt, synthetic construct
  modified_base 8..9: mod_base = OTHER; note = thymine
  modified_base 11: mod_base = OTHER; note = thymine
  modified_base 14: mod_base = OTHER; note = thymine
  misc_feature 1..20: note = Description of Combined DNA/RNA Molecule: Synthetic oligonucleotide
  source 1..20: mol_type = other RNA
taataaattgtcatcaccag

SEQ ID NO: 2300 - RNA, 20 nt, synthetic construct
  modified_base 8..9: mod_base = OTHER; note = thymine
  modified_base 11: mod_base = OTHER; note = thymine
  modified_base 14: mod_base = OTHER; note = thymine
  misc_feature 1..20: note = Description of Combined DNA/RNA Molecule: Synthetic oligonucleotide
  source 1..20: mol_type = other RNA
taataaattgtcatcaccag

SEQ ID NO: 2301 - RNA, 20 nt, synthetic construct
  modified_base 9..10: mod_base = OTHER; note = thymine
  modified_base 12: mod_base = OTHER; note = thymine
  modified_base 15: mod_base = OTHER; note = thymine
  misc_feature 1..20: note = Description of Combined DNA/RNA Molecule: Synthetic oligonucleotide
  source 1..20: mol_type = other RNA
ttaataaattgtcatcacca

SEQ ID NO: 2302 - RNA, 20 nt, synthetic construct
  modified_base 9..10: mod_base = OTHER; note = thymine
  modified_base 12: mod_base = OTHER; note = thymine
  modified_base 15: mod_base = OTHER; note = thymine
  misc_feature 1..20: note = Description of Combined DNA/RNA Molecule: Synthetic oligonucleotide
  source 1..20: mol_type = other RNA
ttaataaattgtcatcacca

SEQ ID NO: 2303 - RNA, 20 nt, synthetic construct
  modified_base 9..10: mod_base = OTHER; note = thymine
  modified_base 12: mod_base = OTHER; note = thymine
  modified_base 15: mod_base = OTHER; note = thymine
  misc_feature 1..20: note = Description of Combined DNA/RNA Molecule: Synthetic oligonucleotide
  source 1..20: mol_type = other RNA
ttaataaattgtcatcacca

SEQ ID NO: 2304 - RNA, 20 nt, synthetic construct
  modified_base 9..10: mod_base = OTHER; note = thymine
  modified_base 12: mod_base = OTHER; note = thymine
  modified_base 15: mod_base = OTHER; note = thymine
  misc_feature 1..20: note = Description of Combined DNA/RNA Molecule: Synthetic oligonucleotide
  source 1..20: mol_type = other RNA
ttaataaattgtcatcacca

SEQ ID NO: 2305 - RNA, 20 nt, synthetic construct
  modified_base 6: mod_base = OTHER; note = thymine
  modified_base 10..11: mod_base = OTHER; note = thymine
  modified_base 13: mod_base = OTHER; note = thymine
  modified_base 16: mod_base = OTHER; note = thymine
  misc_feature 1..20: note = Description of Combined DNA/RNA Molecule: Synthetic oligonucleotide
  source 1..20: mol_type = other RNA
attaataaattgtcatcacc

SEQ ID NO: 2306 - RNA, 20 nt, synthetic construct
  modified_base 6: mod_base = OTHER; note = thymine
  modified_base 10..11: mod_base = OTHER; note = thymine
  modified_base 13: mod_base = OTHER; note = thymine
  modified_base 16: mod_base = OTHER; note = thymine
  misc_feature 1..20: note = Description of Combined DNA/RNA Molecule: Synthetic oligonucleotide
  source 1..20: mol_type = other RNA
attaataaattgtcatcacc

SEQ ID NO: 2307 - RNA, 20 nt, synthetic construct
  modified_base 6: mod_base = OTHER; note = thymine
  modified_base 10..11: mod_base = OTHER; note = thymine
  modified_base 13: mod_base = OTHER; note = thymine
  modified_base 16: mod_base = OTHER; note = thymine
  misc_feature 1..20: note = Description of Combined DNA/RNA Molecule: Synthetic oligonucleotide
  source 1..20: mol_type = other RNA
attaataaattgtcatcacc

SEQ ID NO: 2308 - RNA, 20 nt, synthetic construct
  modified_base 6: mod_base = OTHER; note = thymine
  modified_base 10..11: mod_base = OTHER; note = thymine
  modified_base 13: mod_base = OTHER; note = thymine
  modified_base 16: mod_base = OTHER; note = thymine
  misc_feature 1..20: note = Description of Combined DNA/RNA Molecule: Synthetic oligonucleotide
  source 1..20: mol_type = other RNA
attaataaattgtcatcacc

SEQ ID NO: 2309 - RNA, 20 nt, synthetic construct
  modified_base 7: mod_base = OTHER; note = thymine
  modified_base 11..12: mod_base = OTHER; note = thymine
  modified_base 14: mod_base = OTHER; note = thymine
  modified_base 17: mod_base = OTHER; note = thymine
  misc_feature 1..20: note = Description of Combined DNA/RNA Molecule: Synthetic oligonucleotide
  source 1..20: mol_type = other RNA
tattaataaattgtcatcac

SEQ ID NO: 2310 - RNA, 20 nt, synthetic construct
  modified_base 7: mod_base = OTHER; note = thymine
  modified_base 11..12: mod_base = OTHER; note = thymine
  modified_base 14: mod_base = OTHER; note = thymine
  modified_base 17: mod_base = OTHER; note = thymine
  misc_feature 1..20: note = Description of Combined DNA/RNA Molecule: Synthetic oligonucleotide
  source 1..20: mol_type = other RNA
tattaataaattgtcatcac

SEQ ID NO: 2311 - RNA, 20 nt, synthetic construct
  modified_base 7: mod_base = OTHER; note = thymine
  modified_base 11..12: mod_base = OTHER; note = thymine
  modified_base 14: mod_base = OTHER; note = thymine
  modified_base 17: mod_base = OTHER; note = thymine
  misc_feature 1..20: note = Description of Combined DNA/RNA Molecule: Synthetic oligonucleotide
  source 1..20: mol_type = other RNA
tattaataaattgtcatcac

SEQ ID NO: 2312 - RNA, 20 nt, synthetic construct
  modified_base 8: mod_base = OTHER; note = thymine
  modified_base 12..13: mod_base = OTHER; note = thymine
  modified_base 15: mod_base = OTHER; note = thymine
  modified_base 18: mod_base = OTHER; note = thymine
  misc_feature 1..20: note = Description of Combined DNA/RNA Molecule: Synthetic oligonucleotide
  source 1..20: mol_type = other RNA
ctattaataaattgtcatca

SEQ ID NO: 2313 - RNA, 20 nt, synthetic construct
  modified_base 8: mod_base = OTHER; note = thymine
  modified_base 12..13: mod_base = OTHER; note = thymine
  modified_base 15: mod_base = OTHER; note = thymine
  modified_base 18: mod_base = OTHER; note = thymine
  misc_feature 1..20: note = Description of Combined DNA/RNA Molecule: Synthetic oligonucleotide
  source 1..20: mol_type = other RNA
ctattaataaattgtcatca

SEQ ID NO: 2314 - RNA, 20 nt, synthetic construct
  modified_base 6: mod_base = OTHER; note = thymine
  modified_base 9: mod_base = OTHER; note = thymine
  modified_base 13..14: mod_base = OTHER; note = thymine
  modified_base 16: mod_base = OTHER; note = thymine
  modified_base 19: mod_base = OTHER; note = thymine
  misc_feature 1..20: note = Description of Combined DNA/RNA Molecule: Synthetic oligonucleotide
  source 1..20: mol_type = other RNA
actattaataaattgtcatc

SEQ ID NO: 2315 - RNA, 20 nt, synthetic construct
  modified_base 1: mod_base = OTHER; note = thymine
  modified_base 3: mod_base = OTHER; note = thymine
  modified_base 6: mod_base = OTHER; note = thymine
  misc_feature 1..20: note = Description of Combined DNA/RNA Molecule: Synthetic oligonucleotide
  source 1..20: mol_type = other RNA
tgtcatcaccagaaaaagtc

SEQ ID NO: 2316 - RNA, 20 nt, synthetic construct
  modified_base 2: mod_base = OTHER; note = thymine
  modified_base 4: mod_base = OTHER; note = thymine
  modified_base 7: mod_base = OTHER; note = thymine
  misc_feature 1..20: note = Description of Combined DNA/RNA Molecule: Synthetic oligonucleotide
  source 1..20: mol_type = other RNA
ttgtcatcaccagaaaaagt

SEQ ID NO: 2317 - RNA, 20 nt, synthetic construct
  modified_base 1..2: mod_base = OTHER; note = thymine
  modified_base 4: mod_base = OTHER; note = thymine
  modified_base 7: mod_base = OTHER; note = thymine
  misc_feature 1..20: note = Description of Combined DNA/RNA Molecule: Synthetic oligonucleotide
  source 1..20: mol_type = other RNA
ttgtcatcaccagaaaaagt

SEQ ID NO: 2318 - RNA, 20 nt, synthetic construct
  modified_base 3: mod_base = OTHER; note = thymine
  modified_base 5: mod_base = OTHER; note = thymine
  modified_base 8: mod_base = OTHER; note = thymine
  misc_feature 1..20: note = Description of Combined DNA/RNA Molecule: Synthetic oligonucleotide
  source 1..20: mol_type = other RNA
attgtcatcaccagaaaaag

SEQ ID NO: 2319 - DNA, 20 bp, synthetic construct
  misc_feature 1..20: note = Description of Artificial Sequence: Synthetic oligonucleotide
  source 1..20: mol_type = other DNA
attgtcatcaccagaaaaag

SEQ ID NO: 2320 - RNA, 20 nt, synthetic construct
  modified_base 4: mod_base = OTHER; note = thymine
  modified_base 6: mod_base = OTHER; note = thymine
  modified_base 9: mod_base = OTHER; note = thymine
  misc_feature 1..20: note = Description of Combined DNA/RNA Molecule: Synthetic oligonucleotide
  source 1..20: mol_type = other RNA
aattgtcatcaccagaaaaa

SEQ ID NO: 2321 - DNA, 20 bp, synthetic construct
  misc_feature 1..20: note = Description of Artificial Sequence: Synthetic oligonucleotide
  source 1..20: mol_type = other DNA
aattgtcatcaccagaaaaa

SEQ ID NO: 2322 - DNA, 20 bp, synthetic construct
  misc_feature 1..20: note = Description of Artificial Sequence: Synthetic oligonucleotide
  source 1..20: mol_type = other DNA
aaattgtcatcaccagaaaa

SEQ ID NO: 2323 - RNA, 20 nt, synthetic construct
  modified_base 5: mod_base = OTHER; note = thymine
  modified_base 7: mod_base = OTHER; note = thymine
  modified_base 10: mod_base = OTHER; note = thymine
  misc_feature 1..20: note = Description of Combined DNA/RNA Molecule: Synthetic oligonucleotide
  source 1..20: mol_type = other RNA
aaattgtcatcaccagaaaa

SEQ ID NO: 2324 - RNA, 20 nt, synthetic construct
  modified_base 6: mod_base = OTHER; note = thymine
  modified_base 8: mod_base = OTHER; note = thymine
  modified_base 11: mod_base = OTHER; note = thymine
  misc_feature 1..20: note = Description of Combined DNA/RNA Molecule: Synthetic oligonucleotide
  source 1..20: mol_type = other RNA
taaattgtcatcaccagaaa

SEQ ID NO: 2325 - RNA, 20 nt, synthetic construct
  modified_base 6: mod_base = OTHER; note = thymine
  modified_base 8: mod_base = OTHER; note = thymine
  modified_base 11: mod_base = OTHER; note = thymine
  misc_feature 1..20: note = Description of Combined DNA/RNA Molecule: Synthetic oligonucleotide
  source 1..20: mol_type = other RNA
taaattgtcatcaccagaaa

SEQ ID NO: 2326 - RNA, 20 nt, synthetic construct
  modified_base 6..7: mod_base = OTHER; note = thymine
  modified_base 9: mod_base = OTHER; note = thymine
  modified_base 12: mod_base = OTHER; note = thymine
  misc_feature 1..20: note = Description of Combined DNA/RNA Molecule: Synthetic oligonucleotide
  source 1..20: mol_type = other RNA
ataaattgtcatcaccagaa

SEQ ID NO: 2327 - RNA, 20 nt, synthetic construct
  modified_base 6..7: mod_base = OTHER; note = thymine
  modified_base 9: mod_base = OTHER; note = thymine
  modified_base 12: mod_base = OTHER; note = thymine
  misc_feature 1..20: note = Description of Combined DNA/RNA Molecule: Synthetic oligonucleotide
  source 1..20: mol_type = other RNA
ataaattgtcatcaccagaa

SEQ ID NO: 2328 - RNA, 20 nt, synthetic construct
  modified_base 7..8: mod_base = OTHER; note = thymine
  modified_base 10: mod_base = OTHER; note = thymine
  modified_base 13: mod_base = OTHER; note = thymine
  misc_feature 1..20: note = Description of Combined DNA/RNA Molecule: Synthetic oligonucleotide
  source 1..20: mol_type = other RNA
aataaattgtcatcaccaga

SEQ ID NO: 2329 - RNA, 20 nt, synthetic construct
  modified_base 7..8: mod_base = OTHER; note = thymine
  modified_base 10: mod_base = OTHER; note = thymine
  modified_base 13: mod_base = OTHER; note = thymine
  misc_feature 1..20: note = Description of Combined DNA/RNA Molecule: Synthetic oligonucleotide
  source 1..20: mol_type = other RNA
aataaattgtcatcaccaga

SEQ ID NO: 2330 - RNA, 20 nt, synthetic construct
  modified_base 7..8: mod_base = OTHER; note = thymine
  modified_base 10: mod_base = OTHER; note = thymine
  modified_base 13: mod_base = OTHER; note = thymine
  misc_feature 1..20: note = Description of Combined DNA/RNA Molecule: Synthetic oligonucleotide
  source 1..20: mol_type = other RNA
aataaattgtcatcaccaga

SEQ ID NO: 2331 - RNA, 20 nt, synthetic construct
  modified_base 8..9: mod_base = OTHER; note = thymine
  modified_base 11: mod_base = OTHER; note = thymine
  modified_base 14: mod_base = OTHER; note = thymine
  misc_feature 1..20: note = Description of Combined DNA/RNA Molecule: Synthetic oligonucleotide
  source 1..20: mol_type = other RNA
taataaattgtcatcaccag

SEQ ID NO: 2332 - RNA, 20 nt, synthetic construct
  modified_base 8..9: mod_base = OTHER; note = thymine
  modified_base 11: mod_base = OTHER; note = thymine
  modified_base 14: mod_base = OTHER; note = thymine
  misc_feature 1..20: note = Description of Combined DNA/RNA Molecule: Synthetic oligonucleotide
  source 1..20: mol_type = other RNA
taataaattgtcatcaccag

SEQ ID NO: 2333 - RNA, 20 nt, synthetic construct
  modified_base 8..9: mod_base = OTHER; note = thymine
  modified_base 11: mod_base = OTHER; note = thymine
  modified_base 14: mod_base = OTHER; note = thymine
  misc_feature 1..20: note = Description of Combined DNA/RNA Molecule: Synthetic oligonucleotide
  source 1..20: mol_type = other RNA
taataaattgtcatcaccag

SEQ ID NO: 2334 - RNA, 20 nt, synthetic construct
  modified_base 8..9: mod_base = OTHER; note = thymine
  modified_base 11: mod_base = OTHER; note = thymine
  modified_base 14: mod_base = OTHER; note = thymine
  misc_feature 1..20: note = Description of Combined DNA/RNA Molecule: Synthetic oligonucleotide
  source 1..20: mol_type = other RNA
taataaattgtcatcaccag

SEQ ID NO: 2335 - RNA, 20 nt, synthetic construct
  modified_base 9..10: mod_base = OTHER; note = thymine
  modified_base 12: mod_base = OTHER; note = thymine
  modified_base 15: mod_base = OTHER; note = thymine
  misc_feature 1..20: note = Description of Combined DNA/RNA Molecule: Synthetic oligonucleotide
  source 1..20: mol_type = other RNA
ttaataaattgtcatcacca

SEQ ID NO: 2336 - RNA, 20 nt, synthetic construct
  modified_base 9..10: mod_base = OTHER; note = thymine
  modified_base 12: mod_base = OTHER; note = thymine
  modified_base 15: mod_base = OTHER; note = thymine
  misc_feature 1..20: note = Description of Combined DNA/RNA Molecule: Synthetic oligonucleotide
  source 1..20: mol_type = other RNA
ttaataaattgtcatcacca

SEQ ID NO: 2337 - RNA, 20 nt, synthetic construct
  modified_base 9..10: mod_base = OTHER; note = thymine
  modified_base 12: mod_base = OTHER; note = thymine
  modified_base 15: mod_base = OTHER; note = thymine
  misc_feature 1..20: note = Description of Combined DNA/RNA Molecule: Synthetic oligonucleotide
  source 1..20: mol_type = other RNA
ttaataaattgtcatcacca

SEQ ID NO: 2338 - RNA, 20 nt, synthetic construct
  modified_base 9..10: mod_base = OTHER; note = thymine
  modified_base 12: mod_base = OTHER; note = thymine
  modified_base 15: mod_base = OTHER; note = thymine
  misc_feature 1..20: note = Description of Combined DNA/RNA Molecule: Synthetic oligonucleotide
  source 1..20: mol_type = other RNA
ttaataaattgtcatcacca

SEQ ID NO: 2339 - RNA, 20 nt, synthetic construct
  modified_base 6: mod_base = OTHER; note = thymine
  modified_base 10..11: mod_base = OTHER; note = thymine
  modified_base 13: mod_base = OTHER; note = thymine
  modified_base 16: mod_base = OTHER; note = thymine
  misc_feature 1..20: note = Description of Combined DNA/RNA Molecule: Synthetic oligonucleotide
  source 1..20: mol_type = other RNA
attaataaattgtcatcacc

SEQ ID NO: 2340 - RNA, 20 nt, synthetic construct
  modified_base 6: mod_base = OTHER; note = thymine
  modified_base 10..11: mod_base = OTHER; note = thymine
  modified_base 13: mod_base = OTHER; note = thymine
  modified_base 16: mod_base = OTHER; note = thymine
  misc_feature 1..20: note = Description of Combined DNA/RNA Molecule: Synthetic oligonucleotide
  source 1..20: mol_type = other RNA
attaataaattgtcatcacc

SEQ ID NO: 2341 - RNA, 20 nt, synthetic construct
  modified_base 6: mod_base = OTHER; note = thymine
  modified_base 10..11: mod_base = OTHER; note = thymine
  modified_base 13: mod_base = OTHER; note = thymine
  modified_base 16: mod_base = OTHER; note = thymine
  misc_feature 1..20: note = Description of Combined DNA/RNA Molecule: Synthetic oligonucleotide
  source 1..20: mol_type = other RNA
attaataaattgtcatcacc

SEQ ID NO: 2342 - RNA, 20 nt, synthetic construct
  modified_base 6: mod_base = OTHER; note = thymine
  modified_base 10..11: mod_base = OTHER; note = thymine
  modified_base 13: mod_base = OTHER; note = thymine
  modified_base 16: mod_base = OTHER; note = thymine
  misc_feature 1..20: note = Description of Combined DNA/RNA Molecule: Synthetic oligonucleotide
  source 1..20: mol_type = other RNA
attaataaattgtcatcacc

SEQ ID NO: 2343 - RNA, 20 nt, synthetic construct
  modified_base 7: mod_base = OTHER; note = thymine
  modified_base 11..12: mod_base = OTHER; note = thymine
  modified_base 14: mod_base = OTHER; note = thymine
  modified_base 17: mod_base = OTHER; note = thymine
  misc_feature 1..20: note = Description of Combined DNA/RNA Molecule: Synthetic oligonucleotide
  source 1..20: mol_type = other RNA
tattaataaattgtcatcac

SEQ ID NO: 2344 - RNA, 20 nt, synthetic construct
  modified_base 7: mod_base = OTHER; note = thymine
  modified_base 11..12: mod_base = OTHER; note = thymine
  modified_base 14: mod_base = OTHER; note = thymine
  modified_base 17: mod_base = OTHER; note = thymine
  misc_feature 1..20: note = Description of Combined DNA/RNA Molecule: Synthetic oligonucleotide
  source 1..20: mol_type = other RNA
tattaataaattgtcatcac

SEQ ID NO: 2345 - RNA, 20 nt, synthetic construct
  modified_base 7: mod_base = OTHER; note = thymine
  modified_base 11..12: mod_base = OTHER; note = thymine
  modified_base 14: mod_base = OTHER; note = thymine
  modified_base 17: mod_base = OTHER; note = thymine
  misc_feature 1..20: note = Description of Combined DNA/RNA Molecule: Synthetic oligonucleotide
  source 1..20: mol_type = other RNA
tattaataaattgtcatcac

SEQ ID NO: 2346 - RNA, 20 nt, synthetic construct
  modified_base 8: mod_base = OTHER; note = thymine
  modified_base 12..13: mod_base = OTHER; note = thymine
  modified_base 15: mod_base = OTHER; note = thymine
  modified_base 18: mod_base = OTHER; note = thymine
  misc_feature 1..20: note = Description of Combined DNA/RNA Molecule: Synthetic oligonucleotide
  source 1..20: mol_type = other RNA
ctattaataaattgtcatca

SEQ ID NO: 2347 - RNA, 20 nt, synthetic construct
  modified_base 8: mod_base = OTHER; note = thymine
  modified_base 12..13: mod_base = OTHER; note = thymine
  modified_base 15: mod_base = OTHER; note = thymine
  modified_base 18: mod_base = OTHER; note = thymine
  misc_feature 1..20: note = Description of Combined DNA/RNA Molecule: Synthetic oligonucleotide
  source 1..20: mol_type = other RNA
ctattaataaattgtcatca

SEQ ID NO: 2348 - RNA, 20 nt, synthetic construct
  modified_base 6: mod_base = OTHER; note = thymine
  modified_base 9: mod_base = OTHER; note = thymine
  modified_base 13..14: mod_base = OTHER; note = thymine
  modified_base 16: mod_base = OTHER; note = thymine
  modified_base 19: mod_base = OTHER; note = thymine
  misc_feature 1..20: note = Description of Combined DNA/RNA Molecule: Synthetic oligonucleotide
  source 1..20: mol_type = other RNA
actattaataaattgtcatc

SEQ ID NO: 2349 - RNA, 32 nt, synthetic construct; identical to SEQ ID NO: 1997
  misc_feature 1..32: note = Description of Artificial Sequence: Synthetic oligonucleotide
  source 1..32: mol_type = other RNA

SEQ ID NO: 2350 - RNA, 32 nt, synthetic construct; identical to SEQ ID NO: 1998
  misc_feature 1..32: note = Description of Artificial Sequence: Synthetic oligonucleotide
  source 1..32: mol_type = other RNA

SEQ ID NO: 2351 - RNA, 20 nt, synthetic construct
  modified_base 6: mod_base = OTHER; note = thymine
  modified_base 8: mod_base = OTHER; note = thymine
  modified_base 11: mod_base = OTHER; note = thymine
  misc_feature 1..20: note = Description of Combined DNA/RNA Molecule: Synthetic oligonucleotide
  source 1..20: mol_type = other RNA
taaattgtcatcaccagaaa

SEQ ID NO: 2352 - RNA, 20 nt, synthetic construct
  modified_base 6..7: mod_base = OTHER; note = thymine
  modified_base 9: mod_base = OTHER; note = thymine
  modified_base 12: mod_base = OTHER; note = thymine
  misc_feature 1..20: note = Description of Combined DNA/RNA Molecule: Synthetic oligonucleotide
  source 1..20: mol_type = other RNA
ataaattgtcatcaccagaa

SEQ ID NO: 2353 - RNA, 20 nt, synthetic construct
  modified_base 7..8: mod_base = OTHER; note = thymine
  modified_base 10: mod_base = OTHER; note = thymine
  modified_base 13: mod_base = OTHER; note = thymine
  misc_feature 1..20: note = Description of Combined DNA/RNA Molecule: Synthetic oligonucleotide
  source 1..20: mol_type = other RNA
aataaattgtcatcaccaga

SEQ ID NO: 2354 - RNA, 20 nt, synthetic construct
  modified_base 8..9: mod_base = OTHER; note = thymine
  modified_base 11: mod_base = OTHER; note = thymine
  modified_base 14: mod_base = OTHER; note = thymine
  misc_feature 1..20: note = Description of Combined DNA/RNA Molecule: Synthetic oligonucleotide
  source 1..20: mol_type = other RNA
taataaattgtcatcaccag

SEQ ID NO: 2355 - RNA, 20 nt, synthetic construct
  modified_base 7..8: mod_base = OTHER; note = thymine
  modified_base 10: mod_base = OTHER; note = thymine
  modified_base 13: mod_base = OTHER; note = thymine
  misc_feature 1..20: note = Description of Combined DNA/RNA Molecule: Synthetic oligonucleotide
  source 1..20: mol_type = other RNA
aataaattgtcatcaccaga

SEQ ID NO: 2356 - RNA, 20 nt, synthetic construct
  modified_base 8..9: mod_base = OTHER; note = thymine
  modified_base 11: mod_base = OTHER; note = thymine
  modified_base 14: mod_base = OTHER; note = thymine
  misc_feature 1..20: note = Description of Combined DNA/RNA Molecule: Synthetic oligonucleotide
  source 1..20: mol_type = other RNA
taataaattgtcatcaccag

SEQ ID NO: 2357 - RNA, 20 nt, synthetic construct
  misc_feature 1..20: note = Description of Artificial Sequence: Synthetic oligonucleotide
  source 1..20: mol_type = other RNA
gcacaagggcacagacttcc

SEQ ID NO: 2358 - RNA, 20 nt, synthetic construct
  misc_feature 1..20: note = Description of Artificial Sequence: Synthetic oligonucleotide
  source 1..20: mol_type = other RNA
gcacaagggcacagacttcc

SEQ ID NO: 2359 - RNA, 20 nt, synthetic construct
  misc_feature 1..20: note = Description of Artificial Sequence: Synthetic oligonucleotide
  source 1..20: mol_type = other RNA
cacaagggcacagacttcca

SEQ ID NO: 2360 - RNA, 20 nt, synthetic construct
  misc_feature 1..20: note = Description of Artificial Sequence: Synthetic oligonucleotide
  source 1..20: mol_type = other RNA
cacaagggcacagacttcca

SEQ ID NO: 2361 - RNA, 20 nt, synthetic construct
  modified_base 6: mod_base = OTHER; note = thymine
  modified_base 8: mod_base = OTHER; note = thymine
  modified_base 11: mod_base = OTHER; note = thymine
  misc_feature 1..20: note = Description of Combined DNA/RNA Molecule: Synthetic oligonucleotide
  source 1..20: mol_type = other RNA
taaattgtcatcaccagaaa

SEQ ID NO: 2362 - RNA, 20 nt, synthetic construct
  modified_base 6..7: mod_base = OTHER; note = thymine
  modified_base 9: mod_base = OTHER; note = thymine
  modified_base 12: mod_base = OTHER; note = thymine
  misc_feature 1..20: note = Description of Combined DNA/RNA Molecule: Synthetic oligonucleotide
  source 1..20: mol_type = other RNA
ataaattgtcatcaccagaa

SEQ ID NO: 2363 - RNA, 20 nt, synthetic construct
  modified_base 7..8: mod_base = OTHER; note = thymine
  modified_base 10: mod_base = OTHER; note = thymine
  modified_base 13: mod_base = OTHER; note = thymine
  misc_feature 1..20: note = Description of Combined DNA/RNA Molecule: Synthetic oligonucleotide
  source 1..20: mol_type = other RNA
aataaattgtcatcaccaga

SEQ ID NO: 2364 - RNA, 20 nt, synthetic construct
  modified_base 8..9: mod_base = OTHER; note = thymine
  modified_base 11: mod_base = OTHER; note = thymine
  modified_base 14: mod_base = OTHER; note = thymine
  misc_feature 1..20: note = Description of Combined DNA/RNA Molecule: Synthetic oligonucleotide
  source 1..20: mol_type = other RNA
taataaattgtcatcaccag

SEQ ID NO: 2365 - RNA, 20 nt, synthetic construct
  misc_feature 1..20: note = Description of Artificial Sequence: Synthetic oligonucleotide
  source 1..20: mol_type = other RNA
tccccacagagggaggaagc

SEQ ID NO: 2366 - RNA, 20 nt, synthetic construct
  misc_feature 1..20: note = Description of Artificial Sequence: Synthetic oligonucleotide
  source 1..20: mol_type = other RNA
ctccccacagagggaggaag

SEQ ID NO: 2367 - RNA, 20 nt, synthetic construct
  misc_feature 1..20: note = Description of Artificial Sequence: Synthetic oligonucleotide
  source 1..20: mol_type = other RNA
cctccccacagagggaggaa

SEQ ID NO: 2368 - RNA, 20 nt, synthetic construct
  misc_feature 1..20: note = Description of Artificial Sequence: Synthetic oligonucleotide
  source 1..20: mol_type = other RNA
tcctccccacagagggagga

SEQ ID NO: 2369 - RNA, 20 nt, synthetic construct
  misc_feature 1..20: note = Description of Artificial Sequence: Synthetic oligonucleotide
  source 1..20: mol_type = other RNA
gtcctccccacagagggagg

SEQ ID NO: 2370 - RNA, 20 nt, synthetic construct
  modified_base 6: mod_base = OTHER; note = thymine
  misc_feature 1..20: note = Description of Combined DNA/RNA Molecule: Synthetic oligonucleotide
  source 1..20: mol_type = other RNA
ggtcctccccacagagggag

SEQ ID NO: 2371 - RNA, 20 nt, synthetic construct
  modified_base 7: mod_base = OTHER; note = thymine
  misc_feature 1..20: note = Description of Combined DNA/RNA Molecule: Synthetic oligonucleotide
  source 1..20: mol_type = other RNA
gggtcctccccacagaggga

SEQ ID NO: 2372 - RNA, 20 nt, synthetic construct
  modified_base 8: mod_base = OTHER; note = thymine
  misc_feature 1..20: note = Description of Combined DNA/RNA Molecule: Synthetic oligonucleotide
  source 1..20: mol_type = other RNA
cgggtcctccccacagaggg

SEQ ID NO: 2373 - RNA, 20 nt, synthetic construct
  modified_base 9: mod_base = OTHER; note = thymine
  misc_feature 1..20: note = Description of Combined DNA/RNA Molecule: Synthetic oligonucleotide
  source 1..20: mol_type = other RNA
acagtagatgagggagcagg

SEQ ID NO: 2374 - DNA, 20 bp, synthetic construct
  misc_feature 1..20: note = Description of Artificial Sequence: Synthetic oligonucleotide
  source 1..20: mol_type = other DNA
cacagtagatgagggagcag

SEQ ID NO: 2375 - DNA, 20 bp, synthetic construct
  misc_feature 1..20: note = Description of Artificial Sequence: Synthetic oligonucleotide
  source 1..20: mol_type = other DNA
acacagtagatgagggagca

SEQ ID NO: 2376 - DNA, 20 bp, synthetic construct
  misc_feature 1..20: note = Description of Artificial Sequence: Synthetic oligonucleotide
  source 1..20: mol_type = other DNA
cacacagtagatgagggagc

SEQ ID NO: 2377 - DNA, 20 bp, synthetic construct
  misc_feature 1..20: note = Description of Artificial Sequence: Synthetic oligonucleotide
  source 1..20: mol_type = other DNA
gcacacagtagatgagggag

SEQ ID NO: 2378 - RNA, 20 nt, synthetic construct
  modified_base 10: mod_base = OTHER; note = thymine
  modified_base 14: mod_base = OTHER; note = thymine
  misc_feature 1..20: note = Description of Combined DNA/RNA Molecule: Synthetic oligonucleotide
  source 1..20: mol_type = other RNA
tgcacacagtagatgaggga

SEQ ID NO: 2379 - RNA, 20 nt, synthetic construct
  modified_base 11: mod_base = OTHER; note = thymine
  modified_base 15: mod_base = OTHER; note = thymine
  misc_feature 1..20: note = Description of Combined DNA/RNA Molecule: Synthetic oligonucleotide
  source 1..20: mol_type = other RNA
gtgcacacagtagatgaggg

SEQ ID NO: 2380 - RNA, 20 nt, synthetic construct
  modified_base 12: mod_base = OTHER; note = thymine
  misc_feature 1..20: note = Description of Combined DNA/RNA Molecule: Synthetic oligonucleotide
  source 1..20: mol_type = other RNA
agtgcacacagtagatgagg

SEQ ID NO: 2381 - RNA, 20 nt, synthetic construct
  misc_feature 1..20: note = Description of Artificial Sequence: Synthetic oligonucleotide
  source 1..20: mol_type = other RNA
tccccacagagggaggaagc

SEQ ID NO: 2382 - RNA, 20 nt, synthetic construct
  misc_feature 1..20: note = Description of Artificial Sequence: Synthetic oligonucleotide
  source 1..20: mol_type = other RNA
ctccccacagagggaggaag

SEQ ID NO: 2383 - RNA, 20 nt, synthetic construct
  misc_feature 1..20: note = Description of Artificial Sequence: Synthetic oligonucleotide
  source 1..20: mol_type = other RNA
cctccccacagagggaggaa

SEQ ID NO: 2384 - RNA, 20 nt, synthetic construct
  misc_feature 1..20: note = Description of Artificial Sequence: Synthetic oligonucleotide
  source 1..20: mol_type = other RNA
tcctccccacagagggagga

SEQ ID NO: 2385 - RNA, 20 nt, synthetic construct
  misc_feature 1..20: note = Description of Artificial Sequence: Synthetic oligonucleotide
  source 1..20: mol_type = other RNA
gtcctccccacagagggagg

SEQ ID NO: 2386 - RNA, 20 nt, synthetic construct
  modified_base 6: mod_base = OTHER; note = thymine
  misc_feature 1..20: note = Description of Combined DNA/RNA Molecule: Synthetic oligonucleotide
  source 1..20: mol_type = other RNA
ggtcctccccacagagggag

SEQ ID NO: 2387 - RNA, 20 nt, synthetic construct
  modified_base 7: mod_base = OTHER; note = thymine
  misc_feature 1..20: note = Description of Combined DNA/RNA Molecule: Synthetic oligonucleotide
  source 1..20: mol_type = other RNA
gggtcctccccacagaggga

SEQ ID NO: 2388 - RNA, 20 nt, synthetic construct
  modified_base 8: mod_base = OTHER; note = thymine
  misc_feature 1..20: note = Description of Combined DNA/RNA Molecule: Synthetic oligonucleotide
  source 1..20: mol_type = other RNA
cgggtcctccccacagaggg

SEQ ID NO: 2389 - RNA, 20 nt, synthetic construct
  modified_base 9: mod_base = OTHER; note = thymine
  misc_feature 1..20: note = Description of Combined DNA/RNA Molecule: Synthetic oligonucleotide
  source 1..20: mol_type = other RNA
acagtagatgagggagcagg

SEQ ID NO: 2390 - DNA, 20 bp, synthetic construct
  misc_feature 1..20: note = Description of Artificial Sequence: Synthetic oligonucleotide
  source 1..20: mol_type = other DNA
cacagtagatgagggagcag

SEQ ID NO: 2391 - DNA, 20 bp, synthetic construct
  misc_feature 1..20: note = Description of Artificial Sequence: Synthetic oligonucleotide
  source 1..20: mol_type = other DNA
acacagtagatgagggagca

SEQ ID NO: 2392 - DNA, 20 bp, synthetic construct
  misc_feature 1..20: note = Description of Artificial Sequence: Synthetic oligonucleotide
  source 1..20: mol_type = other DNA
cacacagtagatgagggagc

SEQ ID NO: 2393 - DNA, 20 bp, synthetic construct
  misc_feature 1..20: note = Description of Artificial Sequence: Synthetic oligonucleotide
  source 1..20: mol_type = other DNA
gcacacagtagatgagggag

SEQ ID NO: 2394 - RNA, 20 nt, synthetic construct
  modified_base 10: mod_base = OTHER; note = thymine
  modified_base 14: mod_base = OTHER; note = thymine
  misc_feature 1..20: note = Description of Combined DNA/RNA Molecule: Synthetic oligonucleotide
  source 1..20: mol_type = other RNA
tgcacacagtagatgaggga

SEQ ID NO: 2395 - RNA, 20 nt, synthetic construct
  modified_base 11: mod_base = OTHER; note = thymine
  modified_base 15: mod_base = OTHER; note = thymine
  misc_feature 1..20: note = Description of Combined DNA/RNA Molecule: Synthetic oligonucleotide
  source 1..20: mol_type = other RNA
gtgcacacagtagatgaggg

SEQ ID NO: 2396 - RNA, 20 nt, synthetic construct
  modified_base 12: mod_base = OTHER; note = thymine
  misc_feature 1..20: note = Description of Combined DNA/RNA Molecule: Synthetic oligonucleotide
  source 1..20: mol_type = other RNA
agtgcacacagtagatgagg

SEQ ID NO: 2397 - DNA, 20 bp, synthetic construct
  misc_feature 1..20: note = Description of Artificial Sequence: Synthetic oligonucleotide
  source 1..20: mol_type = other DNA
ggcacaagggcacagacttc

SEQ ID NO: 2398 - RNA, 20 nt, synthetic construct
  misc_feature 1..20: note = Description of Artificial Sequence: Synthetic oligonucleotide
  source 1..20: mol_type = other RNA
ggcacaagggcacagacttc

SEQ ID NO: 2399 - RNA, 20 nt, synthetic construct
  modified_base 7: mod_base = OTHER; note = thymine
  misc_feature 1..20: note = Description of Combined DNA/RNA Molecule: Synthetic oligonucleotide
  source 1..20: mol_type = other RNA
gggtcctccccacagaggga

SEQ ID NO: 2400 - RNA, 20 nt, synthetic construct
  modified_base 7: mod_base = OTHER; note = thymine
  misc_feature 1..20: note = Description of Combined DNA/RNA Molecule: Synthetic oligonucleotide
  source 1..20: mol_type = other RNA
gggtcctccccacagaggga

SEQ ID NO: 2401 - RNA, 20 nt, synthetic construct
  modified_base 7: mod_base = OTHER; note = thymine
  misc_feature 1..20: note = Description of Combined DNA/RNA Molecule: Synthetic oligonucleotide
  source 1..20: mol_type = other RNA
gggtcctccccacagaggga

SEQ ID NO: 2402 - RNA, 20 nt, synthetic construct
  modified_base 7: mod_base = OTHER; note = thymine
  misc_feature 1..20: note = Description of Combined DNA/RNA Molecule: Synthetic oligonucleotide
  source 1..20: mol_type = other RNA
gggtcctccccacagaggga

SEQ ID NO: 2403 - RNA, 20 nt, synthetic construct
  modified_base 7: mod_base = OTHER; note = thymine
  misc_feature 1..20: note = Description of Combined DNA/RNA Molecule: Synthetic oligonucleotide
  source 1..20: mol_type = other RNA
gggttctccccacagaggga

SEQ ID NO: 2404 - RNA, 20 nt, synthetic construct
  misc_feature 1..20: note = Description of Artificial Sequence: Synthetic oligonucleotide
  source 1..20: mol_type = other RNA
ggcacaagggcacagacttc

SEQ ID NO: 2405 - RNA, 20 nt, synthetic construct
  misc_feature 1..20: note = Description of Artificial Sequence: Synthetic oligonucleotide
  source 1..20: mol_type = other RNA
ggcacaagggcacagacttc

SEQ ID NO: 2406 - RNA, 20 nt, synthetic construct
  misc_feature 1..20: note = Description of Artificial Sequence: Synthetic oligonucleotide
  source 1..20: mol_type = other RNA
ggcacaagggcacagacttc

SEQ ID NO: 2407 - RNA, 20 nt, synthetic construct
  misc_feature 1..20: note = Description of Artificial Sequence: Synthetic oligonucleotide
  source 1..20: mol_type = other RNA
ggcacaagggcacagacttc

SEQ ID NO: 2408 - RNA, 20 nt, synthetic construct
  misc_feature 1..20: note = Description of Artificial Sequence: Synthetic oligonucleotide
  source 1..20: mol_type = other RNA
ggcacaagggcacagacttc

SEQ ID NO: 2409 - RNA, 20 nt, synthetic construct
  misc_feature 1..20: note = Description of Artificial Sequence: Synthetic oligonucleotide
  source 1..20: mol_type = other RNA
ggcacaagggcacagacttc

SEQ ID NO: 2410 - RNA, 20 nt, synthetic construct
  misc_feature 1..20: note = Description of Artificial Sequence: Synthetic oligonucleotide
  source 1..20: mol_type = other RNA
ggcacaagggcacagacttc

SEQ ID NO: 2411 - RNA, 20 nt, synthetic construct
  misc_feature 1..20: note = Description of Artificial Sequence: Synthetic oligonucleotide
  source 1..20: mol_type = other RNA
ggcacaagggcacagacttc

SEQ ID NO: 2412 - RNA, 20 nt, synthetic construct
  misc_feature 1..20: note = Description of Artificial Sequence: Synthetic oligonucleotide
  source 1..20: mol_type = other RNA
ggcacaagggcacagacttc

SEQ ID NO: 2413 - RNA, 20 nt, synthetic construct
  misc_feature 1..20: note = Description of Artificial Sequence: Synthetic oligonucleotide
  source 1..20: mol_type = other RNA
ggcacaagggcacagacttc

SEQ ID NO: 2414 - RNA, 20 nt, synthetic construct
  misc_feature 1..20: note = Description of Artificial Sequence: Synthetic oligonucleotide
  source 1..20: mol_type = other RNA
ggcacaagggcacagacttc

SEQ ID NO: 2415 - RNA, 20 nt, synthetic construct
  misc_feature 1..20: note = Description of Artificial Sequence: Synthetic oligonucleotide
  source 1..20: mol_type = other RNA
ggcacaagggcacagacttc

SEQ ID NO: 2416 - RNA, 20 nt, synthetic construct
  misc_feature 1..20: note = Description of Artificial Sequence: Synthetic oligonucleotide
  source 1..20: mol_type = other RNA
ggcacaagggcacagacttc

SEQ ID NO: 2417 - RNA, 21 nt, synthetic construct
  misc_feature 1..21: note = Description of Artificial Sequence: Synthetic oligonucleotide
  source 1..21: mol_type = other RNA
ggaagtctgtgcccgtgttcc

SEQ ID NO: 2418 - RNA, 20 nt, synthetic construct
  misc_feature 1..20: note = Description of Artificial Sequence: Synthetic oligonucleotide
  source 1..20: mol_type = other RNA
ggcacaagggcacagacttc

SEQ ID NO: 2419 - RNA, 20 nt, synthetic construct
  misc_feature 1..20: note = Description of Artificial Sequence: Synthetic oligonucleotide
  source 1..20: mol_type = other RNA
tcaaggaagatggcatttct

SEQ ID NO: 2420 - RNA, 20 nt, synthetic construct
  misc_feature 1..20: note = Description of Artificial Sequence: Synthetic oligonucleotide
  source 1..20: mol_type = other RNA
tcaaggaagatggcatttct

SEQ ID NO: 2421 - RNA, 20 nt, synthetic construct
  misc_feature 1..20: note = Description of Artificial Sequence: Synthetic oligonucleotide
  source 1..20: mol_type = other RNA
tcaaggaagatggcatttct

SEQ ID NO: 2422 - RNA, 20 nt, synthetic construct
  misc_feature 1..20: note = Description of Artificial Sequence: Synthetic oligonucleotide
  source 1..20: mol_type = other RNA
tcaaggaagatggcatttct

SEQ ID NO: 2423 - RNA, 20 nt, synthetic construct
  misc_feature 1..20: note = Description of Artificial Sequence: Synthetic oligonucleotide
  source 1..20: mol_type = other RNA
tcaaggaagatggcatttct

SEQ ID NO: 2424 - DNA, 21 bp, synthetic construct
  misc_feature 1..21: note = Description of Artificial Sequence: Synthetic primer
  source 1..21: mol_type = other DNA
gtgatggtgggtgaccttgag

SEQ ID NO: 2425 - DNA, 19 bp, synthetic construct
  misc_feature 1..19: note = Description of Artificial Sequence: Synthetic primer
  source 1..19: mol_type = other DNA
tttgggcagcggtaatgag

SEQ ID NO: 2426 - DNA, 17 bp, synthetic construct
  misc_feature 1..17: note = Description of Artificial Sequence: Synthetic probe
  source 1..17: mol_type = other DNA
caagcagaaggcaacaa

SEQ ID NO: 2427 - DNA, 26 bp, synthetic construct
  misc_feature 1..26: note = Description of Artificial Sequence: Synthetic primer
  source 1..26: mol_type = other DNA
tgaaaataagctcaagcagacaaatc

SEQ ID NO: 2428 - DNA, 20 bp, synthetic construct
  misc_feature 1..20: note = Description of Artificial Sequence: Synthetic primer
  source 1..20: mol_type = other DNA
gacgcctctgttccaaatcc

SEQ ID NO: 2429 - DNA, 18 bp, synthetic construct
  misc_feature 1..18: note = Description of Artificial Sequence: Synthetic probe
  source 1..18: mol_type = other DNA
cagtggataaaggcaaca

SEQ ID NO: 2430 - DNA, 10 bp, synthetic construct
  misc_feature 1..10: note = Description of Artificial Sequence: Synthetic oligonucleotide
  source 1..10: mol_type = other DNA
agaaatgcca

SEQ ID NO: 2431 - DNA, 10 bp, synthetic construct
  misc_feature 1..10: note = Description of Artificial Sequence: Synthetic oligonucleotide
  source 1..10: mol_type = other DNA
tcttccttga

SEQ ID NO: 2432 - RNA, 20 nt, synthetic construct
  misc_feature 1..20: note = Description of Artificial Sequence: Synthetic oligonucleotide
  source 1..20: mol_type = other RNA
tcaaggaagatggcatttct

SEQ ID NO: 2433 - DNA, 60 bp, Mus sp.
  source 1..60: mol_type = genomic DNA
gtggttactaaggaaactgtcatctccaaactagaaatgccatcttctttgctgttggag

SEQ ID NO: 2434 - DNA, 60 bp, Homo sapiens
  source 1..60: mol_type = genomic DNA
gtggttactaaggaaactgccatctccaaactagaaatgccatcttccttgatgttggag
